United States Patent Application Publication US 2019/0224279 A1 - sequence listing, part 7

SEQ ID NO: 98786 - protein, 27 aa, Artificial Sequence
  Cyclic GFR-binding peptide
IGKTPKIRHKRLVVNNASDYYLISTAS

SEQ ID NO: 98787 - protein, 27 aa, Artificial Sequence
  Cyclic GFR-binding peptide
IGKTPKIYHYKLVVNNASDKYLISIPS

SEQ ID NO: 98788 - protein, 27 aa, Artificial Sequence
  Cyclic GFR-binding peptide
IGKTPKIYHYKLIIQQKDNKYLMSIPS

SEQ ID NO: 98789 - protein, 27 aa, Artificial Sequence
  Cyclic GFR-binding peptide
IGKTPKIRHKRLVVNNAADYYLISTAS

SEQ ID NO: 98790 - protein, 27 aa, Artificial Sequence
  Cyclic GFR-binding peptide
EPISILYLDENKNVVKFKYEIGKTPKI

SEQ ID NO: 98791 - protein, 27 aa, Artificial Sequence
  Cyclic GFR-binding peptide
SPINILYFVGRTPKVYGKIPIGKTPKI

SEQ ID NO: 98792 - protein, 27 aa, Artificial Sequence
  Cyclic GFR-binding peptide
EPISMLYLDNGRVLLKFKYEIGKTPKI

SEQ ID NO: 98793 - protein, 27 aa, Artificial Sequence
  Cyclic GFR-binding peptide
SPISILYKDENKNVVLKYHYIGKTPKI

SEQ ID NO: 98794 - protein, 27 aa, Artificial Sequence
  Cyclic GFR-binding peptide
SATSMLYYDNGRVLLLRKHRIGKTPKI

SEQ ID NO: 98795 - protein, 27 aa, Artificial Sequence
  Cyclic GFR-binding peptide
SPISMLYKDNGRVLLLKYHYIGKTPKI

SEQ ID NO: 98796 - protein, 27 aa, Artificial Sequence
  Cyclic GFR-binding peptide
SATSILYYDENKNVVLRKHRIGKTPKI

SEQ ID NO: 98797 - protein, 27 aa, Artificial Sequence
  Cyclic GFR-binding peptide
NAISILYFDENKNVVLKKYRIGKTPKI

SEQ ID NO: 98798 - protein, 27 aa, Artificial Sequence
  Cyclic GFR-binding peptide
SPINILYFDENKNVVYGKIPIGKTPKI

SEQ ID NO: 98799 - protein, 27 aa, Artificial Sequence
  Cyclic GFR-binding peptide
SPINILYFIGKTPKIYGKIPIGKTPKI

SEQ ID NO: 98800 - protein, 27 aa, Artificial Sequence
  Cyclic GFR-binding peptide
SATSILYYDKGVVTYLRKHRIGKTPKI

SEQ ID NO: 98801 - protein, 27 aa, Artificial Sequence
  Cyclic GFR-binding peptide
EPISILYLDSANNVVKFKYEIGKTPKI

SEQ ID NO: 98802 - protein, 27 aa, Artificial Sequence
  Cyclic GFR-binding peptide
SATSMLYYNDKQQIILRKHRIGKTPKI

SEQ ID NO: 98803 - protein, 27 aa, Artificial Sequence
  Cyclic GFR-binding peptide
EPISMLYLNDKQQIIKFKYEIGKTPKI

SEQ ID NO: 98804 - protein, 27 aa, Artificial Sequence
  Cyclic GFR-binding peptide
SPINILYFVGRKPKVYGKIPIGKTPKI

SEQ ID NO: 98805 - protein, 27 aa, Artificial Sequence
  Cyclic GFR-binding peptide
SATSILYYDSANNVVLRKHRIGKTPKI

SEQ ID NO: 98806 - protein, 27 aa, Artificial Sequence
  Cyclic GFR-binding peptide
SPISILYKDSANNVVLKYHYIGKTPKI

SEQ ID NO: 98807 - protein, 27 aa, Artificial Sequence
  Cyclic GFR-binding peptide
SPISMLYKNDKQQIILKYHYIGKTPKI

SEQ ID NO: 98808 - protein, 27 aa, Artificial Sequence
  Cyclic GFR-binding peptide
SATSILYYDAANNVVLRKHRIGKTPKI

SEQ ID NO: 98809 - protein, 27 aa, Artificial Sequence
  Cyclic GFR-binding peptide
IGKTPKISMEGIIIQQKDNMIQMTINS

SEQ ID NO: 98810 - protein, 27 aa, Artificial Sequence
  Cyclic GFR-binding peptide
IGKTPKISMEGLVKPKRGVMIQITINS

SEQ ID NO: 98811 - protein, 27 aa, Artificial Sequence
  Cyclic GFR-binding peptide
IGKTPKISMEGLVVNNASDMIQITINS

SEQ ID NO: 98812 - protein, 27 aa, Artificial Sequence
  Cyclic GFR-binding peptide
IGKTPKISMEGILLVRGNDMIQMTINS

SEQ ID NO: 98813 - protein, 27 aa, Artificial Sequence
  Cyclic GFR-binding peptide
IGKTPKISMEGLIKPTKGIMIQITINS

SEQ ID NO: 98814 - protein, 27 aa, Artificial Sequence
  Cyclic GFR-binding peptide
IGKTPKISMEGLIVNSSDDMIQVTINS

SEQ ID NO: 98815 - protein, 27 aa, Artificial Sequence
  Cyclic GFR-binding peptide
IGKTPKISMEGIVVNNASDMIQITINS

SEQ ID NO: 98816 - protein, 27 aa, Artificial Sequence
  Cyclic GFR-binding peptide
IGKTPKISMEGLVVNNAADMIQITINS

SEQ ID NO: 98817 - protein, 27 aa, Artificial Sequence
  Cyclic GFR-binding peptide
IGKTPKISMEGLLLVRGNDMIQMTINS

SEQ ID NO: 98818 - protein, 27 aa, Artificial Sequence
  Cyclic GFR-binding peptide
IGKTPKISMEGLIIQQKDNMIQMTINS

SEQ ID NO: 98819 - protein, 27 aa, Artificial Sequence
  Cyclic GFR-binding peptide
IGKTPKISMEGIVVNNAADMIQITINS

SEQ ID NO: 98820 - protein, 27 aa, Artificial Sequence
  Cyclic GFR-binding peptide
IGKTPKISMEGLVKPTRGVMIQITINS

SEQ ID NO: 98821 - protein, 27 aa, Artificial Sequence
  Cyclic GFR-binding peptide
SNITMQIMNDKQQIIIGEMSIGKTPKI

SEQ ID NO: 98822 - protein, 27 aa, Artificial Sequence
  Cyclic GFR-binding peptide
SNITIQIMVGRKPKVLGEMSIGKTPKI

SEQ ID NO: 98823 - protein, 27 aa, Artificial Sequence
  Cyclic GFR-binding peptide
SNITIQIMDSANNVVLGEMSIGKTPKI

SEQ ID NO: 98824 - protein, 27 aa, Artificial Sequence
  Cyclic GFR-binding peptide
SNITMQIMDNGRVLLIGEMSIGKTPKI

SEQ ID NO: 98825 - protein, 27 aa, Artificial Sequence
  Cyclic GFR-binding peptide
SNITIQIMIGKTPKILGEMSIGKTPKI

SEQ ID NO: 98826 - protein, 27 aa, Artificial Sequence
  Cyclic GFR-binding peptide
SNITVQIMDDSSNVILGEMSIGKTPKI

SEQ ID NO: 98827 - protein, 27 aa, Artificial Sequence
  Cyclic GFR-binding peptide
SNITIQIMDSANNVVIGEMSIGKTPKI

SEQ ID NO: 98828 - protein, 27 aa, Artificial Sequence
  Cyclic GFR-binding peptide
SNITIQIMDAANNVVLGEMSIGKTPKI

SEQ ID NO: 98829 - protein, 27 aa, Artificial Sequence
  Cyclic GFR-binding peptide
SNITMQIMDNGRVLLLGEMSIGKTPKI

SEQ ID NO: 98830 - protein, 27 aa, Artificial Sequence
  Cyclic GFR-binding peptide
SNITMQIMNDKQQIILGEMSIGKTPKI

SEQ ID NO: 98831 - protein, 27 aa, Artificial Sequence
  Cyclic GFR-binding peptide
SNITIQIMDAANNVVIGEMSIGKTPKI

SEQ ID NO: 98832 - protein, 27 aa, Artificial Sequence
  Cyclic GFR-binding peptide
SNITIQIMVGRTPKVLGEMSIGKTPKI

SEQ ID NO: 98833 - protein, 27 aa, Artificial Sequence
  Cyclic GFR-binding peptide
IGKTPKIQYNKLVVNKNEDLYLISIAS

SEQ ID NO: 98834 - protein, 27 aa, Artificial Sequence
  Cyclic GFR-binding peptide
IGKTPKIQYNKLVVNNAADLYLISIAS

SEQ ID NO: 98835 - protein, 27 aa, Artificial Sequence
  Cyclic GFR-binding peptide
IGKTPKIQYNKLIIQQKDNLYLMSIAS

SEQ ID NO: 98836 - protein, 27 aa, Artificial Sequence
  Cyclic GFR-binding peptide
IGKTPKIQYNKLLLVRGNDLYLMSIAS

SEQ ID NO: 98837 - protein, 27 aa, Artificial Sequence
  Cyclic GFR-binding peptide
IGKTPKIQYNKLYTVVGKDLYLISIAS

SEQ ID NO: 98838 - protein, 27 aa, Artificial Sequence
  Cyclic GFR-binding peptide
SAISILYLDENKNVVLKNYQIGKTPKI

SEQ ID NO: 98839 - protein, 27 aa, Artificial Sequence
  Cyclic GFR-binding peptide
SAISILYLDAANNVVLKNYQIGKTPKI

SEQ ID NO: 98840 - protein, 27 aa, Artificial Sequence
  Cyclic GFR-binding peptide
SAISMLYLNDKQQIILKNYQIGKTPKI

SEQ ID NO: 98841 - protein, 27 aa, Artificial Sequence
  Cyclic GFR-binding peptide
SAISMLYLDNGRVLLLKNYQIGKTPKI

SEQ ID NO: 98842 - protein, 27 aa, Artificial Sequence
  Cyclic GFR-binding peptide
SAISILYLDKGVVTYLKNYQIGKTPKI

SEQ ID NO: 98843 - protein, 27 aa, Artificial Sequence
  Cyclic GFR-binding peptide
VGRTPKVRYKKLIKPTKGIFYLISIAN

SEQ ID NO: 98844 - protein, 29 aa, Artificial Sequence
  Cyclic GFR-binding peptide
VGRTPKVRHKRLFIPKKRVIEYYLVSTAS

SEQ ID NO: 98845 - protein, 27 aa, Artificial Sequence
  Cyclic GFR-binding peptide
VGRTPKVYHYKLVVKDYEDKYLMSIPS

SEQ ID NO: 98846 - protein, 27 aa, Artificial Sequence
  Cyclic GFR-binding peptide
VGRTPKVQYNKLIVNNSSDLYLVSIAS

SEQ ID NO: 98847 - protein, 27 aa, Artificial Sequence
  Cyclic GFR-binding peptide
VGRTPKVRYKKLVVKDYEDFYLMSIAN

SEQ ID NO: 98848 - protein, 27 aa, Artificial Sequence
  Cyclic GFR-binding peptide
VGRTPKVRYKKLVKPTRGVFYLISIAN

SEQ ID NO: 98849 - protein, 27 aa, Artificial Sequence
  Cyclic GFR-binding peptide
VGRTPKVRHKRLVVKENEDYYLMSTAS

SEQ ID NO: 98850 - protein, 27 aa, Artificial Sequence
  Cyclic GFR-binding peptide
VGRTPKVYHYKLIKPTKGIKYLISIPS

SEQ ID NO: 98851 - protein, 29 aa, Artificial Sequence
  Cyclic GFR-binding peptide
VGRTPKVRYKKLFIPKKRVIEFYLVSIAN

SEQ ID NO: 98852 - protein, 27 aa, Artificial Sequence
  Cyclic GFR-binding peptide
VGRTPKVYHYKLVVKENEDKYLMSIPS

SEQ ID NO: 98853 - protein, 27 aa, Artificial Sequence
  Cyclic GFR-binding peptide
VGRTPKVRHKRLVKPKRGVYYLISTAS

SEQ ID NO: 98854 - protein, 27 aa, Artificial Sequence
  Cyclic GFR-binding peptide
VGRTPKVYHYKLVKPKRGVKYLISIPS

SEQ ID NO: 98855 - protein, 29 aa, Artificial Sequence
  Cyclic GFR-binding peptide
VGRTPKVQYNKLFIPKKRVIELYLVSIAS

SEQ ID NO: 98856 - protein, 27 aa, Artificial Sequence
  Cyclic GFR-binding peptide
VGRTPKVQYNKLVKPTRGVLYLISIAS

SEQ ID NO: 98857 - protein, 27 aa, Artificial Sequence
  Cyclic GFR-binding peptide
VGRTPKVRYKKLVVKENEDFYLMSIAN

SEQ ID NO: 98858 - protein, 27 aa, Artificial Sequence
  Cyclic GFR-binding peptide
VGRTPKVQYNKLTPVGMDDLYLVSIAS

SEQ ID NO: 98859 - protein, 27 aa, Artificial Sequence
  Cyclic GFR-binding peptide
VGRTPKVRYKKLTPVGMDDFYLVSIAN

SEQ ID NO: 98860 - protein, 27 aa, Artificial Sequence
  Cyclic GFR-binding peptide
VGRTPKVRYKKLVKPKRGVFYLISIAN

SEQ ID NO: 98861 - protein, 27 aa, Artificial Sequence
  Cyclic GFR-binding peptide
VGRTPKVQYNKLVVKENEDLYLMSIAS

SEQ ID NO: 98862 - protein, 27 aa, Artificial Sequence
  Cyclic GFR-binding peptide
VGRTPKVYHYKLIVNSSDDKYLVSIPS

SEQ ID NO: 98863 - protein, 27 aa, Artificial Sequence
  Cyclic GFR-binding peptide
VGRTPKVQYNKLVKPKRGVLYLISIAS

SEQ ID NO: 98864 - protein, 27 aa, Artificial Sequence
  Cyclic GFR-binding peptide
VGRTPKVRYKKLIVNNSSDFYLVSIAN

SEQ ID NO: 98865 - protein, 27 aa, Artificial Sequence
  Cyclic GFR-binding peptide
VGRTPKVRYKKLIVNSSDDFYLVSIAN

SEQ ID NO: 98866 - protein, 27 aa, Artificial Sequence
  Cyclic GFR-binding peptide
VGRTPKVRHKRLVKPTRGVYYLISTAS

SEQ ID NO: 98867 - protein, 29 aa, Artificial Sequence
  Cyclic GFR-binding peptide
VGRTPKVYHYKLFIPKKRVIEKYLVSIPS

SEQ ID NO: 98868 - protein, 27 aa, Artificial Sequence
  Cyclic GFR-binding peptide
VGRTPKVRHKRLIKPTKGIYYLISTAS

SEQ ID NO: 98869 - protein, 27 aa, Artificial Sequence
  Cyclic GFR-binding peptide
VGRTPKVRHKRLTPVGMDDYYLVSTAS

SEQ ID NO: 98870 - protein, 27 aa, Artificial Sequence
  Cyclic GFR-binding peptide
VGRTPKVYHYKLTPVGMDDKYLVSIPS

SEQ ID NO: 98871 - protein, 27 aa, Artificial Sequence
  Cyclic GFR-binding peptide
VGRTPKVYHYKLIVNNSSDKYLVSIPS

SEQ ID NO: 98872 - protein, 27 aa, Artificial Sequence
  Cyclic GFR-binding peptide
VGRTPKVRHKRLIVNNSSDYYLVSTAS

SEQ ID NO: 98873 - protein, 27 aa, Artificial Sequence
  Cyclic GFR-binding peptide
VGRTPKVYHYKLVKPTRGVKYLISIPS

SEQ ID NO: 98874 - protein, 27 aa, Artificial Sequence
  Cyclic GFR-binding peptide
VGRTPKVRHKRLIVNSSDDYYLVSTAS

SEQ ID NO: 98875 - protein, 27 aa, Artificial Sequence
  Cyclic GFR-binding peptide
VGRTPKVRHKRLVVKDYEDYYLMSTAS

SEQ ID NO: 98876 - protein, 27 aa, Artificial Sequence
  Cyclic GFR-binding peptide
VGRTPKVQYNKLIKPTKGILYLISIAS

SEQ ID NO: 98877 - protein, 27 aa, Artificial Sequence
  Cyclic GFR-binding peptide
VGRTPKVQYNKLVVKDYEDLYLMSIAS

SEQ ID NO: 98878 - protein, 27 aa, Artificial Sequence
  Cyclic GFR-binding peptide
VGRTPKVQYNKLIVNSSDDLYLVSIAS

SEQ ID NO: 98879 - protein, 27 aa, Artificial Sequence
  Cyclic GFR-binding peptide
NAISILYFIGKTPKILKKYRVGRTPKV

SEQ ID NO: 98880 - protein, 29 aa, Artificial Sequence
  Cyclic GFR-binding peptide
SATSVLYYEIVRKKPIFLRKHRVGRTPKV

SEQ ID NO: 98881 - protein, 27 aa, Artificial Sequence
  Cyclic GFR-binding peptide
SPISMLYKDEYDKVVLKYHYVGRTPKV

SEQ ID NO: 98882 - protein, 27 aa, Artificial Sequence
  Cyclic GFR-binding peptide
SAISVLYLDSSNNVILKNYQVGRTPKV

SEQ ID NO: 98883 - protein, 27 aa, Artificial Sequence
  Cyclic GFR-binding peptide
NAISMLYFDEYDKVVLKKYRVGRTPKV

SEQ ID NO: 98884 - protein, 27 aa, Artificial Sequence
  Cyclic GFR-binding peptide
NAISILYFVGRTPKVLKKYRVGRTPKV

SEQ ID NO: 98885 - protein, 27 aa, Artificial Sequence
  Cyclic GFR-binding peptide
SATSMLYYDENEKVVLRKHRVGRTPKV

SEQ ID NO: 98886 - protein, 27 aa, Artificial Sequence
  Cyclic GFR-binding peptide
SPISILYKIGKTPKILKYHYVGRTPKV

SEQ ID NO: 98887 - protein, 29 aa, Artificial Sequence
  Cyclic GFR-binding peptide
NAISVLYFEIVRKKPIFLKKYRVGRTPKV

SEQ ID NO: 98888 - protein, 27 aa, Artificial Sequence
  Cyclic GFR-binding peptide
SPISMLYKDENEKVVLKYHYVGRTPKV

SEQ ID NO: 98889 - protein, 27 aa, Artificial Sequence
  Cyclic GFR-binding peptide
SATSILYYVGRKPKVLRKHRVGRTPKV

SEQ ID NO: 98890 - protein, 27 aa, Artificial Sequence
  Cyclic GFR-binding peptide
SPISILYKVGRKPKVLKYHYVGRTPKV

SEQ ID NO: 98891 - protein, 29 aa, Artificial Sequence
  Cyclic GFR-binding peptide
SAISVLYLEIVRKKPIFLKNYQVGRTPKV

SEQ ID NO: 98892 - protein, 27 aa, Artificial Sequence
  Cyclic GFR-binding peptide
NAISMLYFDENEKVVLKKYRVGRTPKV

SEQ ID NO: 98893 - protein, 27 aa, Artificial Sequence
  Cyclic GFR-binding peptide
SAISVLYLDDMGVPTLKNYQVGRTPKV

SEQ ID NO: 98894 - protein, 27 aa, Artificial Sequence
  Cyclic GFR-binding peptide
NAISVLYFDDMGVPTLKKYRVGRTPKV

SEQ ID NO: 98895 - protein, 27 aa, Artificial Sequence
  Cyclic GFR-binding peptide
NAISILYFVGRKPKVLKKYRVGRTPKV

SEQ ID NO: 98896 - protein, 27 aa, Artificial Sequence
  Cyclic GFR-binding peptide
SAISMLYLDENEKVVLKNYQVGRTPKV

SEQ ID NO: 98897 - protein, 27 aa, Artificial Sequence
  Cyclic GFR-binding peptide
SPISVLYKDDSSNVILKYHYVGRTPKV

SEQ ID NO: 98898 - protein, 27 aa, Artificial Sequence
  Cyclic GFR-binding peptide
SAISILYLVGRKPKVLKNYQVGRTPKV

SEQ ID NO: 98899 - protein, 27 aa, Artificial Sequence
  Cyclic GFR-binding peptide
NAISVLYFDSSNNVILKKYRVGRTPKV

SEQ ID NO: 98900 - protein, 27 aa, Artificial Sequence
  Cyclic GFR-binding peptide
NAISVLYFDDSSNVILKKYRVGRTPKV

SEQ ID NO: 98901 - protein, 27 aa, Artificial Sequence
  Cyclic GFR-binding peptide
SATSILYYVGRTPKVLRKHRVGRTPKV

SEQ ID NO: 98902 - protein, 29 aa, Artificial Sequence
  Cyclic GFR-binding peptide
SPISVLYKEIVRKKPIFLKYHYVGRTPKV

SEQ ID NO: 98903 - protein, 27 aa, Artificial Sequence
  Cyclic GFR-binding peptide
SATSILYYIGKTPKILRKHRVGRTPKV

SEQ ID NO: 98904 - protein, 27 aa, Artificial Sequence
  Cyclic GFR-binding peptide
SATSVLYYDDMGVPTLRKHRVGRTPKV

SEQ ID NO: 98905 - protein, 27 aa, Artificial Sequence
  Cyclic GFR-binding peptide
SPISVLYKDDMGVPTLKYHYVGRTPKV

SEQ ID NO: 98906 - protein, 27 aa, Artificial Sequence
  Cyclic GFR-binding peptide
SPISVLYKDSSNNVILKYHYVGRTPKV

SEQ ID NO: 98907 - protein, 27 aa, Artificial Sequence
  Cyclic GFR-binding peptide
SATSVLYYDSSNNVILRKHRVGRTPKV

SEQ ID NO: 98908 - protein, 27 aa, Artificial Sequence
  Cyclic GFR-binding peptide
SPISILYKVGRTPKVLKYHYVGRTPKV

SEQ ID NO: 98909 - protein, 27 aa, Artificial Sequence
  Cyclic GFR-binding peptide
SATSVLYYDDSSNVILRKHRVGRTPKV

SEQ ID NO: 98910 - protein, 27 aa, Artificial Sequence
  Cyclic GFR-binding peptide
SATSMLYYDEYDKVVLRKHRVGRTPKV

SEQ ID NO: 98911 - protein, 27 aa, Artificial Sequence
  Cyclic GFR-binding peptide
SAISILYLIGKTPKILKNYQVGRTPKV

SEQ ID NO: 98912 - protein, 27 aa, Artificial Sequence
  Cyclic GFR-binding peptide
SAISMLYLDEYDKVVLKNYQVGRTPKV

SEQ ID NO: 98913 - protein, 27 aa, Artificial Sequence
  Cyclic GFR-binding peptide
SAISVLYLDDSSNVILKNYQVGRTPKV

SEQ ID NO: 98914 - protein, 27 aa, Artificial Sequence
  Cyclic GFR-binding peptide
VGRTPKVNSLQEVVKDYEDYYLMTLPE

SEQ ID NO: 98915 - protein, 27 aa, Artificial Sequence
  Cyclic GFR-binding peptide
VGRTPKVNSLQEIKPTKGIYYVIPLPE

SEQ ID NO: 98916 - protein, 27 aa, Artificial Sequence
  Cyclic GFR-binding peptide
VGRTPKVNSLQEVKPKRGVYYLITLPE

SEQ ID NO: 98917 - protein, 27 aa, Artificial Sequence
  Cyclic GFR-binding peptide
VGRTPKVNSLQEVKPTRGVYYVIPLPE

SEQ ID NO: 98918 - protein, 27 aa, Artificial Sequence
  Cyclic GFR-binding peptide
VGRTPKVEYQKYIVNSSDDIFLVSIPS

SEQ ID NO: 98919 - protein, 27 aa, Artificial Sequence
  Cyclic GFR-binding peptide
VGRTPKVEYQKYVKPTRGVIFLISIPS

SEQ ID NO: 98920 - protein, 27 aa, Artificial Sequence
  Cyclic GFR-binding peptide
VGRTPKVNSLQEVVKENEDYYLMTLPE

SEQ ID NO: 98921 - protein, 27 aa, Artificial Sequence
  Cyclic GFR-binding peptide
VGRTPKVNSLQEVVNNASDYYLITLPE

SEQ ID NO: 98922 - protein, 27 aa, Artificial Sequence
  Cyclic GFR-binding peptide
VGRTPKVNSLQEVKPKRGVYYVIPLPE

SEQ ID NO: 98923 - protein, 27 aa, Artificial Sequence
  Cyclic GFR-binding peptide
VGRTPKVNSLQEVVNNASDYYVIPLPE

SEQ ID NO: 98924 - protein, 27 aa, Artificial Sequence
  Cyclic GFR-binding peptide
VGRTPKVNSLQEVKPTRGVYYLITLPE

SEQ ID NO: 98925 - protein, 27 aa, Artificial Sequence
  Cyclic GFR-binding peptide
VGRTPKVEYQKYIKPTKGIIFLISIPS

SEQ ID NO: 98926 - protein, 27 aa, Artificial Sequence
  Cyclic GFR-binding peptide
VGRTPKVEYQKYVVNNASDIFLISIPS

SEQ ID NO: 98927 - protein, 27 aa, Artificial Sequence
  Cyclic GFR-binding peptide
VGRTPKVNSLQEIVNSSDDYYVVPLPE

SEQ ID NO: 98928 - protein, 27 aa, Artificial Sequence
  Cyclic GFR-binding peptide
VGRTPKVNSLQEVVKDYEDYYVMPLPE

SEQ ID NO: 98929 - protein, 27 aa, Artificial Sequence
  Cyclic GFR-binding peptide
VGRTPKVEYQKYVVKENEDIFLMSIPS

SEQ ID NO: 98930 - protein, 27 aa, Artificial Sequence
  Cyclic GFR-binding peptide
VGRTPKVNSLQEVVKENEDYYVMPLPE

SEQ ID NO: 98931 - protein, 27 aa, Artificial Sequence
  Cyclic GFR-binding peptide
VGRTPKVEYQKYVVKDYEDIFLMSIPS

SEQ ID NO: 98932 - protein, 27 aa, Artificial Sequence
  Cyclic GFR-binding peptide
VGRTPKVQYNKLVVNNASDLYLISIAS

SEQ ID NO: 98933 - protein, 27 aa, Artificial Sequence
  Cyclic GFR-binding peptide
VGRTPKVNSLQEIKPTKGIYYLITLPE

SEQ ID NO: 98934 - protein, 27 aa, Artificial Sequence
  Cyclic GFR-binding peptide
VGRTPKVEYQKYVKPKRGVIFLISIPS

SEQ ID NO: 98935 - protein, 27 aa, Artificial Sequence
  Cyclic GFR-binding peptide
VGRTPKVRYKKLVVNNASDFYLISIAN

SEQ ID NO: 98936 - protein, 27 aa, Artificial Sequence
  Cyclic GFR-binding peptide
VGRTPKVNSLQEIVNSSDDYYLVTLPE

SEQ ID NO: 98937 - protein, 27 aa, Artificial Sequence
  Cyclic GFR-binding peptide
EPLTMLYYDEYDKVVEQLSNVGRTPKV

SEQ ID NO: 98938 - protein, 27 aa, Artificial Sequence
  Cyclic GFR-binding peptide
EPLPIVYYIGKTPKIEQLSNVGRTPKV

SEQ ID NO: 98939 - protein, 27 aa, Artificial Sequence
  Cyclic GFR-binding peptide
EPLTILYYVGRKPKVEQLSNVGRTPKV

SEQ ID NO: 98940 - protein, 27 aa, Artificial Sequence
  Cyclic GFR-binding peptide
EPLPIVYYVGRTPKVEQLSNVGRTPKV

SEQ ID NO: 98941 - protein, 27 aa, Artificial Sequence
  Cyclic GFR-binding peptide
SPISVLFIDDSSNVIYKQYEVGRTPKV

SEQ ID NO: 98942 - protein, 27 aa, Artificial Sequence
  Cyclic GFR-binding peptide
SPISILFIVGRTPKVYKQYEVGRTPKV

SEQ ID NO: 98943 - protein, 27 aa, Artificial Sequence
  Cyclic GFR-binding peptide
EPLTMLYYDENEKVVEQLSNVGRTPKV

SEQ ID NO: 98944 - protein, 27 aa, Artificial Sequence
  Cyclic GFR-binding peptide
EPLTILYYDSANNVVEQLSNVGRTPKV

SEQ ID NO: 98945 - protein, 27 aa, Artificial Sequence
  Cyclic GFR-binding peptide
EPLPIVYYVGRKPKVEQLSNVGRTPKV

SEQ ID NO: 98946 - protein, 27 aa, Artificial Sequence
  Cyclic GFR-binding peptide
EPLPIVYYDSANNVVEQLSNVGRTPKV

SEQ ID NO: 98947 - protein, 27 aa, Artificial Sequence
  Cyclic GFR-binding peptide
EPLTILYYVGRTPKVEQLSNVGRTPKV

SEQ ID NO: 98948 - protein, 27 aa, Artificial Sequence
  Cyclic GFR-binding peptide
SPISILFIIGKTPKIYKQYEVGRTPKV

SEQ ID NO: 98949 - protein, 27 aa, Artificial Sequence
  Cyclic GFR-binding peptide
SPISILFIDSANNVVYKQYEVGRTPKV

SEQ ID NO: 98950 - protein, 27 aa, Artificial Sequence
  Cyclic GFR-binding peptide
EPLPVVYYDDSSNVIEQLSNVGRTPKV

SEQ ID NO: 98951 - protein, 27 aa, Artificial Sequence
  Cyclic GFR-binding peptide
EPLPMVYYDEYDKVVEQLSNVGRTPKV

SEQ ID NO: 98952 - protein, 27 aa, Artificial Sequence
  Cyclic GFR-binding peptide
SPISMLFIDENEKVVYKQYEVGRTPKV

SEQ ID NO: 98953 - protein, 27 aa, Artificial Sequence
  Cyclic GFR-binding peptide
EPLPMVYYDENEKVVEQLSNVGRTPKV

SEQ ID NO: 98954 - protein, 27 aa, Artificial Sequence
  Cyclic GFR-binding peptide
SPISMLFIDEYDKVVYKQYEVGRTPKV

SEQ ID NO: 98955 - protein, 27 aa, Artificial Sequence
  Cyclic GFR-binding peptide
SAISILYLDSANNVVLKNYQVGRTPKV

SEQ ID NO: 98956 - protein, 27 aa, Artificial Sequence
  Cyclic GFR-binding peptide
EPLTILYYIGKTPKIEQLSNVGRTPKV

SEQ ID NO: 98957 - protein, 27 aa, Artificial Sequence
  Cyclic GFR-binding peptide
SPISILFIVGRKPKVYKQYEVGRTPKV

SEQ ID NO: 98958 - protein, 27 aa, Artificial Sequence
  Cyclic GFR-binding peptide
NAISILYFDSANNVVLKKYRVGRTPKV

SEQ ID NO: 98959 - protein, 27 aa, Artificial Sequence
  Cyclic GFR-binding peptide
EPLTVLYYDDSSNVIEQLSNVGRTPKV

SEQ ID NO: 98960 - protein, 29 aa, Artificial Sequence
  Cyclic GFR-binding peptide
VGRTPKVVTAKKLKPKKRVYEIKRVQVPR

SEQ ID NO: 98961 - protein, 29 aa, Artificial Sequence
  Cyclic GFR-binding peptide
VGRTPKVVQVEKLKPKKRVYEVKAVKVSR

SEQ ID NO: 98962 - protein, 29 aa, Artificial Sequence
  Cyclic GFR-binding peptide
VGRTPKVVQVEKFIPKKRVIEVKAVKVSR

SEQ ID NO: 98963 - protein, 29 aa, Artificial Sequence
  Cyclic GFR-binding peptide
VGRTPKVVQVEKHQGQHPKIRVKAMKVSR

SEQ ID NO: 98964 - protein, 29 aa, Artificial Sequence
  Cyclic GFR-binding peptide
VGRTPKVVTAKKHQGQHPKIRIKRMQVPR

SEQ ID NO: 98965 - protein, 29 aa, Artificial Sequence
  Cyclic GFR-binding peptide
VGRTPKVSMEGLLKPKKRVYEMIQVTINS

SEQ ID NO: 98966 - protein, 29 aa, Artificial Sequence
  Cyclic GFR-binding peptide
VGRTPKVSMEGIFIPKKRVIEMIQVTINS

SEQ ID NO: 98967 - protein, 29 aa, Artificial Sequence
  Cyclic GFR-binding peptide
VGRTPKVSMEGLHQGQHPKIRMIQMTINS

SEQ ID NO: 98968 - protein, 29 aa, Artificial Sequence
  Cyclic GFR-binding peptide
VGRTPKVSMEGILKPKKRVYEMIQVTINS

SEQ ID NO: 98969 - protein, 29 aa, Artificial Sequence
  Cyclic GFR-binding peptide
VGRTPKVSMEGLFIPKKRVIEMIQVTINS

SEQ ID NO: 98970 - protein, 29 aa, Artificial Sequence
  Cyclic GFR-binding peptide
VGRTPKVVTAKKFIPKKRVIEIKRVQVPR

SEQ ID NO: 98971 - protein, 29 aa, Artificial Sequence
  Cyclic GFR-binding peptide
VGRTPKVSMEGIHQGQHPKIRMIQMTINS

SEQ ID NO: 98972 - protein, 29 aa, Artificial Sequence
  Cyclic GFR-binding peptide
RPVQVRKIEYVRKKPKLKKATVVGRTPKV

SEQ ID NO: 98973 - protein, 29 aa, Artificial Sequence
  Cyclic GFR-binding peptide
RSVKVAKVEYVRKKPKLKEVQVVGRTPKV

SEQ ID NO: 98974 - protein, 29 aa, Artificial Sequence
  Cyclic GFR-binding peptide
RSVKVAKVEIVRKKPIFKEVQVVGRTPKV

SEQ ID NO: 98975 - protein, 29 aa, Artificial Sequence
  Cyclic GFR-binding peptide
RSVKMAKVRIKPHQGQHKEVQVVGRTPKV

SEQ ID NO: 98976 - protein, 29 aa, Artificial Sequence
  Cyclic GFR-binding peptide
RPVQMRKIRIKPHQGQHKKATVVGRTPKV

SEQ ID NO: 98977 - protein, 29 aa, Artificial Sequence
  Cyclic GFR-binding peptide
SNITVQIMEYVRKKPKLLGEMSVGRTPKV

SEQ ID NO: 98978 - protein, 29 aa, Artificial Sequence
  Cyclic GFR-binding peptide
SNITVQIMEIVRKKPIFIGEMSVGRTPKV

SEQ ID NO: 98979 - protein, 29 aa, Artificial Sequence
  Cyclic GFR-binding peptide
SNITMQIMRIKPHQGQHLGEMSVGRTPKV

SEQ ID NO: 98980 - protein, 29 aa, Artificial Sequence
  Cyclic GFR-binding peptide
SNITVQIMEYVRKKPKLIGEMSVGRTPKV

SEQ ID NO: 98981 - protein, 29 aa, Artificial Sequence
  Cyclic GFR-binding peptide
SNITVQIMEIVRKKPIFLGEMSVGRTPKV

SEQ ID NO: 98982 - protein, 29 aa, Artificial Sequence
  Cyclic GFR-binding peptide
RPVQVRKIEIVRKKPIFKKATVVGRTPKV

SEQ ID NO: 98983 - protein, 29 aa, Artificial Sequence
  Cyclic GFR-binding peptide
SNITMQIMRIKPHQGQHIGEMSVGRTPKV

SEQ ID NO: 98984 - protein, 27 aa, Artificial Sequence
  Cyclic GFR-binding peptide
VGRTPKVEYKFKVKPTRGVLYLISIPE

SEQ ID NO: 98985 - protein, 27 aa, Artificial Sequence
  Cyclic GFR-binding peptide
VGRTPKVEYKFKTPVGMDDLYLVSIPE

SEQ ID NO: 98986 - protein, 27 aa, Artificial Sequence
  Cyclic GFR-binding peptide
VGRTPKVEYQKYVKPKRGVIYLISIPS

SEQ ID NO: 98987 - protein, 27 aa, Artificial Sequence
  Cyclic GFR-binding peptide
VGRTPKVEYQKYVVKDYEDIYLMSIPS

SEQ ID NO: 98988 - protein, 27 aa, Artificial Sequence
  Cyclic GFR-binding peptide
VGRTPKVEYKFKIKPTKGILYLISIPE

SEQ ID NO: 98989 - protein, 27 aa, Artificial Sequence
  Cyclic GFR-binding peptide
VGRTPKVYHYKLYTVVGKDKYLISIPS

SEQ ID NO: 98990 - protein, 27 aa, Artificial Sequence
  Cyclic GFR-binding peptide
VGRTPKVRYKKLYTVVGKDFYLISIAN

SEQ ID NO: 98991 - protein, 27 aa, Artificial Sequence
  Cyclic GFR-binding peptide
VGRTPKVEYQKYVVNNAADIYLISIPS

SEQ ID NO: 98992 - protein, 27 aa, Artificial Sequence
  Cyclic GFR-binding peptide
VGRTPKVEYQKYVKPTRGVIYLISIPS

SEQ ID NO: 98993 - protein, 27 aa, Artificial Sequence
  Cyclic GFR-binding peptide
VGRTPKVEYQKYTPVGMDDIYLVSIPS

SEQ ID NO: 98994 - protein, 27 aa, Artificial Sequence
  Cyclic GFR-binding peptide
VGRTPKVEYKFKVVKDYEDLYLMSIPE

SEQ ID NO: 98995 - protein, 27 aa, Artificial Sequence
  Cyclic GFR-binding peptide
VGRTPKVEYKFKVVNNAADLYLISIPE

SEQ ID NO: 98996 - protein, 27 aa, Artificial Sequence
  Cyclic GFR-binding peptide
VGRTPKVEYQKYVVKENEDIYLMSIPS

SEQ ID NO: 98997 - protein, 27 aa, Artificial Sequence
  Cyclic GFR-binding peptide
VGRTPKVEYQKYIKPTKGIIYLISIPS

SEQ ID NO: 98998 - protein, 27 aa, Artificial Sequence
  Cyclic GFR-binding peptide
VGRTPKVRYKKLVVNNAADFYLISIAN

SEQ ID NO: 98999 - protein, 27 aa, Artificial Sequence
  Cyclic GFR-binding peptide
VGRTPKVYHYKLVVNNAADKYLISIPS

SEQ ID NO: 99000 - protein, 27 aa, Artificial Sequence
  Cyclic GFR-binding peptide
VGRTPKVEYKFKIVNNSSDLYLVSIPE

SEQ ID NO: 99001 - protein, 27 aa, Artificial Sequence
  Cyclic GFR-binding peptide
VGRTPKVEYQKYIVNSSDDIYLVSIPS

SEQ ID NO: 99002 - protein, 27 aa, Artificial Sequence
  Cyclic GFR-binding peptide
VGRTPKVEYKFKIVNSSDDLYLVSIPE

SEQ ID NO: 99003 - protein, 27 aa, Artificial Sequence
  Cyclic GFR-binding peptide
VGRTPKVEYKFKVKPKRGVLYLISIPE

SEQ ID NO: 99004 - protein, 27 aa, Artificial Sequence
  Cyclic GFR-binding peptide
VGRTPKVEYQKYYTVVGKDIYLISIPS

SEQ ID NO: 99005 - protein, 27 aa, Artificial Sequence
  Cyclic GFR-binding peptide
VGRTPKVEYKFKVVKENEDLYLMSIPE

SEQ ID NO: 99006 - protein, 27 aa, Artificial Sequence
  Cyclic GFR-binding peptide
VGRTPKVEYQKYIVNNSSDIYLVSIPS

SEQ ID NO: 99007 - protein, 27 aa, Artificial Sequence
  Cyclic GFR-binding peptide
VGRTPKVEYKFKYTVVGKDLYLISIPE

SEQ ID NO: 99008 - protein, 27 aa, Artificial Sequence
  Cyclic GFR-binding peptide
EPISILYLVGRTPKVKFKYEVGRTPKV

SEQ ID NO: 99009 - protein, 27 aa, Artificial Sequence
  Cyclic GFR-binding peptide
EPISVLYLDDMGVPTKFKYEVGRTPKV

SEQ ID NO: 99010 - protein, 27 aa, Artificial Sequence
  Cyclic GFR-binding peptide
SPISILYIVGRKPKVYKQYEVGRTPKV

SEQ ID NO: 99011 - protein, 27 aa, Artificial Sequence
  Cyclic GFR-binding peptide
SPISMLYIDEYDKVVYKQYEVGRTPKV

SEQ ID NO: 99012 - protein, 27 aa, Artificial Sequence
  Cyclic GFR-binding peptide
EPISILYLIGKTPKIKFKYEVGRTPKV

SEQ ID NO: 99013 - protein, 27 aa, Artificial Sequence
  Cyclic GFR-binding peptide
SPISILYKDKGVVTYLKYHYVGRTPKV

SEQ ID NO: 99014 - protein, 27 aa, Artificial Sequence
  Cyclic GFR-binding peptide
NAISILYFDKGVVTYLKKYRVGRTPKV

SEQ ID NO: 99015 - protein, 27 aa, Artificial Sequence
  Cyclic GFR-binding peptide
SPISILYIDAANNVVYKQYEVGRTPKV

SEQ ID NO: 99016 - protein, 27 aa, Artificial Sequence
  Cyclic GFR-binding peptide
SPISILYIVGRTPKVYKQYEVGRTPKV

SEQ ID NO: 99017 - protein, 27 aa, Artificial Sequence
  Cyclic GFR-binding peptide
SPISVLYIDDMGVPTYKQYEVGRTPKV

SEQ ID NO: 99018 - protein, 27 aa, Artificial Sequence
  Cyclic GFR-binding peptide
EPISMLYLDEYDKVVKFKYEVGRTPKV

SEQ ID NO: 99019 - protein, 27 aa, Artificial Sequence
  Cyclic GFR-binding peptide
EPISILYLDAANNVVKFKYEVGRTPKV

SEQ ID NO: 99020 - protein, 27 aa, Artificial Sequence
  Cyclic GFR-binding peptide
SPISMLYIDENEKVVYKQYEVGRTPKV

SEQ ID NO: 99021 - protein, 27 aa, Artificial Sequence
  Cyclic GFR-binding peptide
SPISILYIIGKTPKIYKQYEVGRTPKV

SEQ ID NO: 99022 - protein, 27 aa, Artificial Sequence
  Cyclic GFR-binding peptide
NAISILYFDAANNVVLKKYRVGRTPKV

SEQ ID NO: 99023 - protein, 27 aa, Artificial Sequence
  Cyclic GFR-binding peptide
SPISILYKDAANNVVLKYHYVGRTPKV

SEQ ID NO: 99024 - protein, 27 aa, Artificial Sequence
  Cyclic GFR-binding peptide
EPISVLYLDSSNNVIKFKYEVGRTPKV

SEQ ID NO: 99025 - protein, 27 aa, Artificial Sequence
  Cyclic GFR-binding peptide
SPISVLYIDDSSNVIYKQYEVGRTPKV

SEQ ID NO: 99026 - protein, 27 aa, Artificial Sequence
  Cyclic GFR-binding peptide
EPISVLYLDDSSNVIKFKYEVGRTPKV

SEQ ID NO: 99027 - protein, 27 aa, Artificial Sequence
  Cyclic GFR-binding peptide
EPISILYLVGRKPKVKFKYEVGRTPKV

SEQ ID NO: 99028 - protein, 27 aa, Artificial Sequence
  Cyclic GFR-binding peptide
SPISILYIDKGVVTYYKQYEVGRTPKV

SEQ ID NO: 99029 - protein, 27 aa, Artificial Sequence
  Cyclic GFR-binding peptide
EPISMLYLDENEKVVKFKYEVGRTPKV

SEQ ID NO: 99030 - protein, 27 aa, Artificial Sequence
  Cyclic GFR-binding peptide
SPISVLYIDSSNNVIYKQYEVGRTPKV

SEQ ID NO: 99031 - protein, 27 aa, Artificial Sequence
  Cyclic GFR-binding peptide
EPISILYLDKGVVTYKFKYEVGRTPKV

SEQ ID NO: 99032 - protein, 27 aa, Artificial Sequence
  Cyclic GFR-binding peptide
VGRTPKVPIKGYIIQQKDNFYLMNIPS

SEQ ID NO: 99033 - protein, 27 aa, Artificial Sequence
  Cyclic GFR-binding peptide
VGRTPKVPIKGYVVKDYEDFYLMNIPS

SEQ ID NO: 99034 - protein, 27 aa, Artificial Sequence
  Cyclic GFR-binding peptide
VGRTPKVPIKGYIVNSSDDFYLVNIPS

SEQ ID NO: 99035 - protein, 27 aa, Artificial Sequence
  Cyclic GFR-binding peptide
VGRTPKVPIKGYVVNNAADFYLINIPS

SEQ ID NO: 99036 - protein, 27 aa, Artificial Sequence
  Cyclic GFR-binding peptide
VGRTPKVPIKGYYTVVGKDFYLINIPS

SEQ ID NO: 99037 - protein, 27 aa, Artificial Sequence
  Cyclic GFR-binding peptide
VGRTPKVPIKGYLLVRGNDFYLMNIPS

SEQ ID NO: 99038 - protein, 27 aa, Artificial Sequence
  Cyclic GFR-binding peptide
VGRTPKVPIKGYVVKENEDFYLMNIPS

SEQ ID NO: 99039 - protein, 27 aa, Artificial Sequence
  Cyclic GFR-binding peptide
VGRTPKVPIKGYVVNNASDFYLINIPS

SEQ ID NO: 99040 - protein, 27 aa, Artificial Sequence
  Cyclic GFR-binding peptide
VGRTPKVPIKGYTPVGMDDFYLVNIPS

SEQ ID NO: 99041 - protein, 27 aa, Artificial Sequence
  Cyclic GFR-binding peptide
VGRTPKVPIKGYIVNNSSDFYLVNIPS

SEQ ID NO: 99042 - protein, 27 aa, Artificial Sequence
  Cyclic GFR-binding peptide
SPINMLYFNDKQQIIYGKIPVGRTPKV

SEQ ID NO: 99043 - protein, 27 aa, Artificial Sequence
  Cyclic GFR-binding peptide
SPINMLYFDEYDKVVYGKIPVGRTPKV

SEQ ID NO: 99044 - protein, 27 aa, Artificial Sequence
  Cyclic GFR-binding peptide
SPINVLYFDDSSNVIYGKIPVGRTPKV

SEQ ID NO: 99045 - protein, 27 aa, Artificial Sequence
  Cyclic GFR-binding peptide
SPINILYFDAANNVVYGKIPVGRTPKV

SEQ ID NO: 99046 - protein, 27 aa, Artificial Sequence
  Cyclic GFR-binding peptide
SPINILYFDKGVVTYYGKIPVGRTPKV

SEQ ID NO: 99047 - protein, 27 aa, Artificial Sequence
  Cyclic GFR-binding peptide
SPINMLYFDNGRVLLYGKIPVGRTPKV

SEQ ID NO: 99048 - protein, 27 aa, Artificial Sequence
  Cyclic GFR-binding peptide
SPINMLYFDENEKVVYGKIPVGRTPKV

SEQ ID NO: 99049 - protein, 27 aa, Artificial Sequence
  Cyclic GFR-binding peptide
SPINILYFDSANNVVYGKIPVGRTPKV

SEQ ID NO: 99050 - protein, 27 aa, Artificial Sequence
  Cyclic GFR-binding peptide
SPINVLYFDDMGVPTYGKIPVGRTPKV

SEQ ID NO: 99051 - protein, 27 aa, Artificial Sequence
  Cyclic GFR-binding peptide
SPINVLYFDSSNNVIYGKIPVGRTPKV

SEQ ID NO: 99052 - protein, 27 aa, Artificial Sequence
  Cyclic GFR-binding peptide
VGRTPKVEYQKYVVNNASDIYLISIPS

SEQ ID NO: 99053 - protein, 27 aa, Artificial Sequence
  Cyclic GFR-binding peptide
VGRTPKVEYQKYIIQQKDNIYLMSIPS

SEQ ID NO: 99054 - protein, 27 aa, Artificial Sequence
  Cyclic GFR-binding peptide
VGRTPKVEYQKYLLVRGNDIYLMSIPS

SEQ ID NO: 99055 - protein, 27 aa, Artificial Sequence
  Cyclic GFR-binding peptide
SPISILYIDSANNVVYKQYEVGRTPKV

SEQ ID NO: 99056 - protein, 27 aa, Artificial Sequence
  Cyclic GFR-binding peptide
SPISMLYINDKQQIIYKQYEVGRTPKV

SEQ ID NO: 99057 - protein, 27 aa, Artificial Sequence
  Cyclic GFR-binding peptide
SPISMLYIDNGRVLLYKQYEVGRTPKV

SEQ ID NO: 99058 - protein, 27 aa, Artificial Sequence
  Cyclic GFR-binding peptide
VGRTPKVPYVKLYTVVGKDFFLISLSS

SEQ ID NO: 99059 - protein, 27 aa, Artificial Sequence
  Cyclic GFR-binding peptide
VGRTPKVPYVKLIKPTKGIFFLISLSS

SEQ ID NO: 99060 - protein, 27 aa, Artificial Sequence
  Cyclic GFR-binding peptide
VGRTPKVPYVKLIIQQKDNFFLMSLSS

SEQ ID NO: 99061 - protein, 27 aa, Artificial Sequence
  Cyclic GFR-binding peptide
VGRTPKVPYVKLIVNSSDDFFLVSLSS

SEQ ID NO: 99062 - protein, 27 aa, Artificial Sequence
  Cyclic GFR-binding peptide
VGRTPKVPYVKLVKPKRGVFFLISLSS

SEQ ID NO: 99063 - protein, 27 aa, Artificial Sequence
  Cyclic GFR-binding peptide
VGRTPKVPYVKLVKPTRGVFFLISLSS

SEQ ID NO: 99064 - protein, 27 aa, Artificial Sequence
  Cyclic GFR-binding peptide
VGRTPKVPYVKLTPVGMDDFFLVSLSS

SEQ ID NO: 99065 - protein, 29 aa, Artificial Sequence
  Cyclic GFR-binding peptide
VGRTPKVPYVKLHQGQHPKIRFFLMSLSS

SEQ ID NO: 99066 - protein, 27 aa, Artificial Sequence
  Cyclic GFR-binding peptide
VGRTPKVPYVKLVVNKNEDFFLISLSS

SEQ ID NO: 99067 - protein, 27 aa, Artificial Sequence
  Cyclic GFR-binding peptide
VGRTPKVPYVKLVVNNASDFFLISLSS

SEQ ID NO: 99068 - protein, 27 aa, Artificial Sequence
  Cyclic GFR-binding peptide
VGRTPKVPYVKLVVKENEDFFLMSLSS

SEQ ID NO: 99069 - protein, 27 aa, Artificial Sequence
  Cyclic GFR-binding peptide
VGRTPKVPYVKLIVNNSSDFFLVSLSS

SEQ ID NO: 99070 - protein, 29 aa, Artificial Sequence
  Cyclic GFR-binding peptide
VGRTPKVPYVKLLKPKKRVYEFFLVSLSS

SEQ ID NO: 99071 - protein, 27 aa, Artificial Sequence
  Cyclic GFR-binding peptide
VGRTPKVPYVKLLLVRGNDFFLMSLSS

SEQ ID NO: 99072 - protein, 27 aa, Artificial Sequence
  Cyclic GFR-binding peptide
VGRTPKVPYVKLVVKDYEDFFLMSLSS

SEQ ID NO: 99073 - protein, 27 aa, Artificial Sequence
  Cyclic GFR-binding peptide
VGRTPKVPYVKLVVNNAADFFLISLSS

SEQ ID NO: 99074 - protein, 27 aa, Artificial Sequence
  Cyclic GFR-binding peptide
SSLSILFFDKGVVTYLKVYPVGRTPKV

SEQ ID NO: 99075 - protein, 27 aa, Artificial Sequence
  Cyclic GFR-binding peptide
SSLSILFFIGKTPKILKVYPVGRTPKV

SEQ ID NO: 99076 - protein, 27 aa, Artificial Sequence
  Cyclic GFR-binding peptide
SSLSMLFFNDKQQIILKVYPVGRTPKV

SEQ ID NO: 99077 - protein, 27 aa, Artificial Sequence
  Cyclic GFR-binding peptide
SSLSVLFFDDSSNVILKVYPVGRTPKV

SEQ ID NO: 99078 - protein, 27 aa, Artificial Sequence
  Cyclic GFR-binding peptide
SSLSILFFVGRKPKVLKVYPVGRTPKV

SEQ ID NO: 99079 - protein, 27 aa, Artificial Sequence
  Cyclic GFR-binding peptide
SSLSILFFVGRTPKVLKVYPVGRTPKV

SEQ ID NO: 99080 - protein, 27 aa, Artificial Sequence
  Cyclic GFR-binding peptide
SSLSVLFFDDMGVPTLKVYPVGRTPKV

SEQ ID NO: 99081 - protein, 29 aa, Artificial Sequence
  Cyclic GFR-binding peptide
SSLSMLFFRIKPHQGQHLKVYPVGRTPKV

SEQ ID NO: 99082 - protein, 27 aa, Artificial Sequence
  Cyclic GFR-binding peptide
SSLSILFFDENKNVVLKVYPVGRTPKV

SEQ ID NO: 99083 - protein, 27 aa, Artificial Sequence
  Cyclic GFR-binding peptide
SSLSILFFDSANNVVLKVYPVGRTPKV

SEQ ID NO: 99084 - protein, 27 aa, Artificial Sequence
  Cyclic GFR-binding peptide
SSLSMLFFDENEKVVLKVYPVGRTPKV

SEQ ID NO: 99085 - protein, 27 aa, Artificial Sequence
  Cyclic GFR-binding peptide
SSLSVLFFDSSNNVILKVYPVGRTPKV

SEQ ID NO: 99086 - protein, 29 aa, Artificial Sequence
  Cyclic GFR-binding peptide
SSLSVLFFEYVRKKPKLLKVYPVGRTPKV

SEQ ID NO: 99087 - protein, 27 aa, Artificial Sequence
  Cyclic GFR-binding peptide
SSLSMLFFDNGRVLLLKVYPVGRTPKV

SEQ ID NO: 99088 - protein, 27 aa, Artificial Sequence
  Cyclic GFR-binding peptide
SSLSMLFFDEYDKVVLKVYPVGRTPKV

SEQ ID NO: 99089 - protein, 27 aa, Artificial Sequence
  Cyclic GFR-binding peptide
SSLSILFFDAANNVVLKVYPVGRTPKV

SEQ ID NO: 99090 - protein, 27 aa, Artificial Sequence
  Cyclic GFR-binding peptide
VGRTPKVSMEGIIVNSSDDMIQVTINS

SEQ ID NO: 99091 - protein, 27 aa, Artificial Sequence
  Cyclic GFR-binding peptide
VGRTPKVVTAKKVVKENEDIKRMQVPR

SEQ ID NO: 99092 - protein, 27 aa, Artificial Sequence
  Cyclic GFR-binding peptide
VGRTPKVSMEGIVVKDYEDMIQMTINS

SEQ ID NO: 99093 - protein, 27 aa, Artificial Sequence
  Cyclic GFR-binding peptide
VGRTPKVVTAKKIKPTKGIIKRIQVPR

SEQ ID NO: 99094 - protein, 27 aa, Artificial Sequence
  Cyclic GFR-binding peptide
VGRTPKVSMEGIVKPTRGVMIQITINS

SEQ ID NO: 99095 - protein, 29 aa, Artificial Sequence
  Cyclic GFR-binding peptide
VGRTPKVNSLQEFIPKKRVIEYYVVPLPE

SEQ ID NO: 99096 - protein, 27 aa, Artificial Sequence
  Cyclic GFR-binding peptide
VGRTPKVVQVEKVKPKRGVVKAIKVSR

SEQ ID NO: 99097 - protein, 27 aa, Artificial Sequence
  Cyclic GFR-binding peptide
VGRTPKVVQVEKVVKENEDVKAMKVSR

SEQ ID NO: 99098 - protein, 27 aa, Artificial Sequence
  Cyclic GFR-binding peptide
VGRTPKVVTAKKIVNSSDDIKRVQVPR

SEQ ID NO: 99099 - protein, 27 aa, Artificial Sequence
  Cyclic GFR-binding peptide
VGRTPKVVQVEKIKPTKGIVKAIKVSR

SEQ ID NO: 99100 - protein, 29 aa, Artificial Sequence
  Cyclic GFR-binding peptide
VGRTPKVNSLQEFIPKKRVIEYYLVTLPE

SEQ ID NO: 99101 - protein, 27 aa, Artificial Sequence
  Cyclic GFR-binding peptide
VGRTPKVVQVEKIVNSSDDVKAVKVSR

SEQ ID NO: 99102 - protein, 27 aa, Artificial Sequence
  Cyclic GFR-binding peptide
VGRTPKVVTAKKVKPKRGVIKRIQVPR

SEQ ID NO: 99103 - protein, 27 aa, Artificial Sequence
  Cyclic GFR-binding peptide
VGRTPKVVQVEKVKPTRGVVKAIKVSR

SEQ ID NO: 99104 - protein, 27 aa, Artificial Sequence
  Cyclic GFR-binding peptide
VGRTPKVVTAKKVKPTRGVIKRIQVPR

SEQ ID NO: 99105 - protein, 29 aa, Artificial Sequence
  Cyclic GFR-binding peptide
VGRTPKVNSLQELKPKKRVYEYYLVTLPE

SEQ ID NO: 99106 - protein, 27 aa, Artificial Sequence
  Cyclic GFR-binding peptide
VGRTPKVSMEGIVKPKRGVMIQITINS

SEQ ID NO: 99107 - protein, 27 aa, Artificial Sequence
  Cyclic GFR-binding peptide
VGRTPKVSMEGIVVKENEDMIQMTINS

SEQ ID NO: 99108 - protein, 27 aa, Artificial Sequence
  Cyclic GFR-binding peptide
VGRTPKVSMEGIIKPTKGIMIQITINS

SEQ ID NO: 99109 - protein, 29 aa, Artificial Sequence
  Cyclic GFR-binding peptide
VGRTPKVNSLQEHQGQHPKIRYYLMTLPE

SEQ ID NO: 99110 - protein, 27 aa, Artificial Sequence
  Cyclic GFR-binding peptide
VGRTPKVVTAKKVVKDYEDIKRMQVPR

SEQ ID NO: 99111 - protein, 29 aa, Artificial Sequence
  Cyclic GFR-binding peptide
VGRTPKVNSLQEHQGQHPKIRYYVMPLPE

SEQ ID NO: 99112 - protein, 29 aa, Artificial Sequence
  Cyclic GFR-binding peptide
VGRTPKVNSLQELKPKKRVYEYYVVPLPE

SEQ ID NO: 99113 - protein, 27 aa, Artificial Sequence
  Cyclic GFR-binding peptide
VGRTPKVVQVEKVVKDYEDVKAMKVSR

SEQ ID NO: 99114 - protein, 27 aa, Artificial Sequence
  Cyclic GFR-binding peptide
SNITVQIMDDSSNVIIGEMSVGRTPKV

SEQ ID NO: 99115 - protein, 27 aa, Artificial Sequence
  Cyclic GFR-binding peptide
RPVQMRKIDENEKVVKKATVVGRTPKV

SEQ ID NO: 99116 - protein, 27 aa, Artificial Sequence
  Cyclic GFR-binding peptide
SNITMQIMDEYDKVVIGEMSVGRTPKV

SEQ ID NO: 99117 - protein, 27 aa, Artificial Sequence
  Cyclic GFR-binding peptide
RPVQIRKIIGKTPKIKKATVVGRTPKV

SEQ ID NO: 99118 - protein, 27 aa, Artificial Sequence
  Cyclic GFR-binding peptide
SNITIQIMVGRTPKVIGEMSVGRTPKV

SEQ ID NO: 99119 - protein, 29 aa, Artificial Sequence
  Cyclic GFR-binding peptide
EPLPVVYYEIVRKKPIFEQLSNVGRTPKV

SEQ ID NO: 99120 - protein, 27 aa, Artificial Sequence
  Cyclic GFR-binding peptide
RSVKIAKVVGRKPKVKEVQVVGRTPKV

SEQ ID NO: 99121 - protein, 27 aa, Artificial Sequence
  Cyclic GFR-binding peptide
RSVKMAKVDENEKVVKEVQVVGRTPKV

SEQ ID NO: 99122 - protein, 27 aa, Artificial Sequence
  Cyclic GFR-binding peptide
RPVQVRKIDDSSNVIKKATVVGRTPKV

SEQ ID NO: 99123 - protein, 27 aa, Artificial Sequence
  Cyclic GFR-binding peptide
RSVKIAKVIGKTPKIKEVQVVGRTPKV

SEQ ID NO: 99124 - protein, 29 aa, Artificial Sequence
  Cyclic GFR-binding peptide
EPLTVLYYEIVRKKPIFEQLSNVGRTPKV

SEQ ID NO: 99125 - protein, 27 aa, Artificial Sequence
  Cyclic GFR-binding peptide
RSVKVAKVDDSSNVIKEVQVVGRTPKV

SEQ ID NO: 99126 - protein, 27 aa, Artificial Sequence
  Cyclic GFR-binding peptide
RPVQIRKIVGRKPKVKKATVVGRTPKV

SEQ ID NO: 99127 - protein, 27 aa, Artificial Sequence
  Cyclic GFR-binding peptide
RSVKIAKVVGRTPKVKEVQVVGRTPKV

SEQ ID NO: 99128 - protein, 27 aa, Artificial Sequence
  Cyclic GFR-binding peptide
RPVQIRKIVGRTPKVKKATVVGRTPKV

SEQ ID NO: 99129 - protein, 29 aa, Artificial Sequence
  Cyclic GFR-binding peptide
EPLTVLYYEYVRKKPKLEQLSNVGRTPKV

SEQ ID NO: 99130 - protein, 27 aa, Artificial Sequence
  Cyclic GFR-binding peptide
SNITIQIMVGRKPKVIGEMSVGRTPKV

SEQ ID NO: 99131 - protein, 27 aa, Artificial Sequence
  Cyclic GFR-binding peptide
SNITMQIMDENEKVVIGEMSVGRTPKV

SEQ ID NO: 99132 - protein, 27 aa, Artificial Sequence
  Cyclic GFR-binding peptide
SNITIQIMIGKTPKIIGEMSVGRTPKV

SEQ ID NO: 99133 - protein, 29 aa, Artificial Sequence
  Cyclic GFR-binding peptide
EPLTMLYYRIKPHQGQHEQLSNVGRTPKV

SEQ ID NO: 99134 - protein, 27 aa, Artificial Sequence
  Cyclic GFR-binding peptide
RPVQMRKIDEYDKVVKKATVVGRTPKV

SEQ ID NO: 99135 - protein, 29 aa, Artificial Sequence
  Cyclic GFR-binding peptide
EPLPMVYYRIKPHQGQHEQLSNVGRTPKV

SEQ ID NO: 99136 - protein, 29 aa, Artificial Sequence
  Cyclic GFR-binding peptide
EPLPVVYYEYVRKKPKLEQLSNVGRTPKV

SEQ ID NO: 99137 - protein, 27 aa, Artificial Sequence
  Cyclic GFR-binding peptide
RSVKMAKVDEYDKVVKEVQVVGRTPKV

SEQ ID NO: 99138 - protein, 27 aa, Artificial Sequence
  Cyclic GFR-binding peptide
VGRTPKVRYKKLIIQQKDNFYLMSIAN

SEQ ID NO: 99139 - protein, 27 aa, Artificial Sequence
  Cyclic GFR-binding peptide
VGRTPKVRYKKLLLVRGNDFYLMSIAN

SEQ ID NO: 99140 - protein, 27 aa, Artificial Sequence
  Cyclic GFR-binding peptide
NAISMLYFNDKQQIILKKYRVGRTPKV

SEQ ID NO: 99141 - protein, 27 aa, Artificial Sequence
  Cyclic GFR-binding peptide
NAISMLYFDNGRVLLLKKYRVGRTPKV

SEQ ID NO: 99142 - protein, 27 aa, Artificial Sequence
  Cyclic GFR-binding peptide
VGRTPKVEYKFKVVNKNEDLYLISIPE

SEQ ID NO: 99143 - protein, 27 aa, Artificial Sequence
  Cyclic GFR-binding peptide
VGRTPKVPIKGYVKPTRGVFYLINIPS

SEQ ID NO: 99144 - protein, 27 aa, Artificial Sequence
  Cyclic GFR-binding peptide
VGRTPKVEYKFKLLVRGNDLYLMSIPE

SEQ ID NO: 99145 - protein, 27 aa, Artificial Sequence
  Cyclic GFR-binding peptide
VGRTPKVYHYKLVVNKNEDKYLISIPS

SEQ ID NO: 99146 - protein, 27 aa, Artificial Sequence
  Cyclic GFR-binding peptide
VGRTPKVRHKRLLLVRGNDYYLMSTAS

SEQ ID NO: 99147 - protein, 27 aa, Artificial Sequence
  Cyclic GFR-binding peptide
VGRTPKVYHYKLLLVRGNDKYLMSIPS

SEQ ID NO: 99148 - protein, 27 aa, Artificial Sequence
  Cyclic GFR-binding peptide
VGRTPKVRHKRLVVNKNEDYYLISTAS

SEQ ID NO: 99149 - protein, 27 aa, Artificial Sequence
  Cyclic GFR-binding peptide
VGRTPKVRYKKLVVNKNEDFYLISIAN

SEQ ID NO: 99150 - protein, 27 aa, Artificial Sequence
  Cyclic GFR-binding peptide
VGRTPKVPIKGYVVNKNEDFYLINIPS

SEQ ID NO: 99151 - protein, 27 aa, Artificial Sequence
  Cyclic GFR-binding peptide
VGRTPKVPIKGYIKPTKGIFYLINIPS

SEQ ID NO: 99152 - protein, 27 aa, Artificial Sequence
  Cyclic GFR-binding peptide
VGRTPKVRHKRLYTVVGKDYYLISTAS

SEQ ID NO: 99153 - protein, 27 aa, Artificial Sequence
  Cyclic GFR-binding peptide
VGRTPKVEYKFKVVNNASDLYLISIPE

SEQ ID NO: 99154 - protein, 27 aa, Artificial Sequence
  Cyclic GFR-binding peptide
VGRTPKVRHKRLIIQQKDNYYLMSTAS

SEQ ID NO: 99155 - protein, 27 aa, Artificial Sequence
  Cyclic GFR-binding peptide
VGRTPKVEYKFKIIQQKDNLYLMSIPE

SEQ ID NO: 99156 - protein, 27 aa, Artificial Sequence
  Cyclic GFR-binding peptide
VGRTPKVPIKGYVKPKRGVFYLINIPS

SEQ ID NO: 99157 - protein, 27 aa, Artificial Sequence
  Cyclic GFR-binding peptide
VGRTPKVRHKRLVVNNASDYYLISTAS

SEQ ID NO: 99158 - protein, 27 aa, Artificial Sequence
  Cyclic GFR-binding peptide
VGRTPKVYHYKLVVNNASDKYLISIPS

SEQ ID NO: 99159 - protein, 27 aa, Artificial Sequence
  Cyclic GFR-binding peptide
VGRTPKVYHYKLIIQQKDNKYLMSIPS

SEQ ID NO: 99160 - protein, 27 aa, Artificial Sequence
  Cyclic GFR-binding peptide
VGRTPKVRHKRLVVNNAADYYLISTAS

SEQ ID NO: 99161 - protein, 27 aa, Artificial Sequence
  Cyclic GFR-binding peptide
EPISILYLDENKNVVKFKYEVGRTPKV

SEQ ID NO: 99162 - protein, 27 aa, Artificial Sequence
  Cyclic GFR-binding peptide
SPINILYFVGRTPKVYGKIPVGRTPKV

SEQ ID NO: 99163 - protein, 27 aa, Artificial Sequence
  Cyclic GFR-binding peptide
EPISMLYLDNGRVLLKFKYEVGRTPKV

SEQ ID NO: 99164 - protein, 27 aa, Artificial Sequence
  Cyclic GFR-binding peptide
SPISILYKDENKNVVLKYHYVGRTPKV

SEQ ID NO: 99165 - protein, 27 aa, Artificial Sequence
  Cyclic GFR-binding peptide
SATSMLYYDNGRVLLLRKHRVGRTPKV

SEQ ID NO: 99166 - protein, 27 aa, Artificial Sequence
  Cyclic GFR-binding peptide
SPISMLYKDNGRVLLLKYHYVGRTPKV

SEQ ID NO: 99167 - protein, 27 aa, Artificial Sequence
  Cyclic GFR-binding peptide
SATSILYYDENKNVVLRKHRVGRTPKV

SEQ ID NO: 99168 - protein, 27 aa, Artificial Sequence
  Cyclic GFR-binding peptide
NAISILYFDENKNVVLKKYRVGRTPKV

SEQ ID NO: 99169 - protein, 27 aa, Artificial Sequence
  Cyclic GFR-binding peptide
SPINILYFDENKNVVYGKIPVGRTPKV

SEQ ID NO: 99170 - protein, 27 aa, Artificial Sequence
  Cyclic GFR-binding peptide
SPINILYFIGKTPKIYGKIPVGRTPKV

SEQ ID NO: 99171 - protein, 27 aa, Artificial Sequence
  Cyclic GFR-binding peptide
SATSILYYDKGVVTYLRKHRVGRTPKV

SEQ ID NO: 99172 - protein, 27 aa, Artificial Sequence
  Cyclic GFR-binding peptide
EPISILYLDSANNVVKFKYEVGRTPKV

SEQ ID NO: 99173 - protein, 27 aa, Artificial Sequence
  Cyclic GFR-binding peptide
SATSMLYYNDKQQIILRKHRVGRTPKV

SEQ ID NO: 99174 - protein, 27 aa, Artificial Sequence
  Cyclic GFR-binding peptide
EPISMLYLNDKQQIIKFKYEVGRTPKV

SEQ ID NO: 99175 - protein, 27 aa, Artificial Sequence
  Cyclic GFR-binding peptide
SPINILYFVGRKPKVYGKIPVGRTPKV

SEQ ID NO: 99176 - protein, 27 aa, Artificial Sequence
  Cyclic GFR-binding peptide
SATSILYYDSANNVVLRKHRVGRTPKV

SEQ ID NO: 99177 - protein, 27 aa, Artificial Sequence
  Cyclic GFR-binding peptide
SPISILYKDSANNVVLKYHYVGRTPKV

SEQ ID NO: 99178 - protein, 27 aa, Artificial Sequence
  Cyclic GFR-binding peptide
SPISMLYKNDKQQIILKYHYVGRTPKV

SEQ ID NO: 99179 - protein, 27 aa, Artificial Sequence
  Cyclic GFR-binding peptide
SATSILYYDAANNVVLRKHRVGRTPKV

SEQ ID NO: 99180 - protein, 27 aa, Artificial Sequence
  Cyclic GFR-binding peptide
VGRTPKVSMEGIIIQQKDNMIQMTINS

SEQ ID NO: 99181 - protein, 27 aa, Artificial Sequence
  Cyclic GFR-binding peptide
VGRTPKVSMEGLVKPKRGVMIQITINS

SEQ ID NO: 99182 - protein, 27 aa, Artificial Sequence
  Cyclic GFR-binding peptide
VGRTPKVSMEGLVVNNASDMIQITINS

SEQ ID NO: 99183 - protein, 27 aa, Artificial Sequence
  Cyclic GFR-binding peptide
VGRTPKVSMEGILLVRGNDMIQMTINS

SEQ ID NO: 99184 - protein, 27 aa, Artificial Sequence
  Cyclic GFR-binding peptide
VGRTPKVSMEGLIKPTKGIMIQITINS

SEQ ID NO: 99185 - protein, 27 aa, Artificial Sequence
  Cyclic GFR-binding peptide
VGRTPKVSMEGLIVNSSDDMIQVTINS

SEQ ID NO: 99186 - protein, 27 aa, Artificial Sequence
  Cyclic GFR-binding peptide
VGRTPKVSMEGIVVNNASDMIQITINS

SEQ ID NO: 99187 - protein, 27 aa, Artificial Sequence
  Cyclic GFR-binding peptide
VGRTPKVSMEGLVVNNAADMIQITINS

SEQ ID NO: 99188 - protein, 27 aa, Artificial Sequence
  Cyclic GFR-binding peptide
VGRTPKVSMEGLLLVRGNDMIQMTINS

SEQ ID NO: 99189 - protein, 27 aa, Artificial Sequence
  Cyclic GFR-binding peptide
VGRTPKVSMEGLIIQQKDNMIQMTINS

SEQ ID NO: 99190 - protein, 27 aa, Artificial Sequence
  Cyclic GFR-binding peptide
VGRTPKVSMEGIVVNNAADMIQITINS

SEQ ID NO: 99191 - protein, 27 aa, Artificial Sequence
  Cyclic GFR-binding peptide
VGRTPKVSMEGLVKPTRGVMIQITINS

SEQ ID NO: 99192 - protein, 27 aa, Artificial Sequence
  Cyclic GFR-binding peptide
SNITMQIMNDKQQIIIGEMSVGRTPKV

SEQ ID NO: 99193 - protein, 27 aa, Artificial Sequence
  Cyclic GFR-binding peptide
SNITIQIMVGRKPKVLGEMSVGRTPKV

SEQ ID NO: 99194 - protein, 27 aa, Artificial Sequence
  Cyclic GFR-binding peptide
SNITIQIMDSANNVVLGEMSVGRTPKV

SEQ ID NO: 99195 - protein, 27 aa, Artificial Sequence
  Cyclic GFR-binding peptide
SNITMQIMDNGRVLLIGEMSVGRTPKV

SEQ ID NO: 99196 - protein, 27 aa, Artificial Sequence
  Cyclic GFR-binding peptide
SNITIQIMIGKTPKILGEMSVGRTPKV

SEQ ID NO: 99197 - protein, 27 aa, Artificial Sequence
  Cyclic GFR-binding peptide
SNITVQIMDDSSNVILGEMSVGRTPKV

SEQ ID NO: 99198 - protein, 27 aa, Artificial Sequence
  Cyclic GFR-binding peptide
SNITIQIMDSANNVVIGEMSVGRTPKV

SEQ ID NO: 99199 - protein, 27 aa, Artificial Sequence
  Cyclic GFR-binding peptide
SNITIQIMDAANNVVLGEMSVGRTPKV

SEQ ID NO: 99200 - protein, 27 aa, Artificial Sequence
  Cyclic GFR-binding peptide
SNITMQIMDNGRVLLLGEMSVGRTPKV

SEQ ID NO: 99201 - protein, 27 aa, Artificial Sequence
  Cyclic GFR-binding peptide
SNITMQIMNDKQQIILGEMSVGRTPKV

SEQ ID NO: 99202 - protein, 27 aa, Artificial Sequence
  Cyclic GFR-binding peptide
SNITIQIMDAANNVVIGEMSVGRTPKV

SEQ ID NO: 99203 - protein, 27 aa, Artificial Sequence
  Cyclic GFR-binding peptide
SNITIQIMVGRTPKVLGEMSVGRTPKV

SEQ ID NO: 99204 - protein, 27 aa, Artificial Sequence
  Cyclic GFR-binding peptide
VGRTPKVQYNKLVVNKNEDLYLISIAS

SEQ ID NO: 99205 - protein, 27 aa, Artificial Sequence
  Cyclic GFR-binding peptide
VGRTPKVQYNKLVVNNAADLYLISIAS

SEQ ID NO: 99206 - protein, 27 aa, Artificial Sequence
  Cyclic GFR-binding peptide
VGRTPKVQYNKLIIQQKDNLYLMSIAS

SEQ ID NO: 99207 - protein, 27 aa, Artificial Sequence
  Cyclic GFR-binding peptide
VGRTPKVQYNKLLLVRGNDLYLMSIAS

SEQ ID NO: 99208 - protein, 27 aa, Artificial Sequence
  Cyclic GFR-binding peptide
VGRTPKVQYNKLYTVVGKDLYLISIAS

SEQ ID NO: 99209 - protein, 27 aa, Artificial Sequence
  Cyclic GFR-binding peptide
SAISILYLDENKNVVLKNYQVGRTPKV

SEQ ID NO: 99210 - protein, 27 aa, Artificial Sequence
  Cyclic GFR-binding peptide
SAISILYLDAANNVVLKNYQVGRTPKV

SEQ ID NO: 99211 - protein, 27 aa, Artificial Sequence
  Cyclic GFR-binding peptide
SAISMLYLNDKQQIILKNYQVGRTPKV

SEQ ID NO: 99212 - protein, 27 aa, Artificial Sequence
  Cyclic GFR-binding peptide
SAISMLYLDNGRVLLLKNYQVGRTPKV

SEQ ID NO: 99213 - protein, 27 aa, Artificial Sequence
  Cyclic GFR-binding peptide
SAISILYLDKGVVTYLKNYQVGRTPKV

SEQ ID NO: 99214 - protein, 29 aa, Artificial Sequence
  Cyclic GFR-binding peptide
RIKPHQGQHRYKKLIKPTKGIFYLISIAN

SEQ ID NO: 99215 - protein, 31 aa, Artificial Sequence
  Cyclic GFR-binding peptide
RIKPHQGQHRHKRLFIPKKRVIEYYLVSTAS

SEQ ID NO: 99216 - protein, 29 aa, Artificial Sequence
  Cyclic GFR-binding peptide
RIKPHQGQHYHYKLVVKDYEDKYLMSIPS

SEQ ID NO: 99217 - protein, 29 aa, Artificial Sequence
  Cyclic GFR-binding peptide
RIKPHQGQHQYNKLIVNNSSDLYLVSIAS

SEQ ID NO: 99218 - protein, 29 aa, Artificial Sequence
  Cyclic GFR-binding peptide
RIKPHQGQHRYKKLVVKDYEDFYLMSIAN

SEQ ID NO: 99219 - protein, 29 aa, Artificial Sequence
  Cyclic GFR-binding peptide
RIKPHQGQHRYKKLVKPTRGVFYLISIAN

SEQ ID NO: 99220 - protein, 29 aa, Artificial Sequence
  Cyclic GFR-binding peptide
RIKPHQGQHRHKRLVVKENEDYYLMSTAS

SEQ ID NO: 99221 - protein, 29 aa, Artificial Sequence
  Cyclic GFR-binding peptide
RIKPHQGQHYHYKLIKPTKGIKYLISIPS

SEQ ID NO: 99222 - protein, 31 aa, Artificial Sequence
  Cyclic GFR-binding peptide
RIKPHQGQHRYKKLFIPKKRVIEFYLVSIAN

SEQ ID NO: 99223 - protein, 29 aa, Artificial Sequence
  Cyclic GFR-binding peptide
RIKPHQGQHYHYKLVVKENEDKYLMSIPS

SEQ ID NO: 99224 - protein, 29 aa, Artificial Sequence
  Cyclic GFR-binding peptide
RIKPHQGQHRHKRLVKPKRGVYYLISTAS

SEQ ID NO: 99225 - protein, 29 aa, Artificial Sequence
  Cyclic GFR-binding peptide
RIKPHQGQHYHYKLVKPKRGVKYLISIPS

SEQ ID NO: 99226 - protein, 31 aa, Artificial Sequence
  Cyclic GFR-binding peptide
RIKPHQGQHQYNKLFIPKKRVIELYLVSIAS

SEQ ID NO: 99227 - protein, 29 aa, Artificial Sequence
  Cyclic GFR-binding peptide
RIKPHQGQHQYNKLVKPTRGVLYLISIAS

SEQ ID NO: 99228 - protein, 29 aa, Artificial Sequence
  Cyclic GFR-binding peptide
RIKPHQGQHRYKKLVVKENEDFYLMSIAN

SEQ ID NO: 99229 - protein, 29 aa, Artificial Sequence
  Cyclic GFR-binding peptide
RIKPHQGQHQYNKLTPVGMDDLYLVSIAS

SEQ ID NO: 99230 - protein, 29 aa, Artificial Sequence
  Cyclic GFR-binding peptide
RIKPHQGQHRYKKLTPVGMDDFYLVSIAN

SEQ ID NO: 99231 - protein, 29 aa, Artificial Sequence
  Cyclic GFR-binding peptide
RIKPHQGQHRYKKLVKPKRGVFYLISIAN

SEQ ID NO: 99232 - protein, 29 aa, Artificial Sequence
  Cyclic GFR-binding peptide
RIKPHQGQHQYNKLVVKENEDLYLMSIAS

SEQ ID NO: 99233 - protein, 29 aa, Artificial Sequence
  Cyclic GFR-binding peptide
RIKPHQGQHYHYKLIVNSSDDKYLVSIPS

SEQ ID NO: 99234 - protein, 29 aa, Artificial Sequence
  Cyclic GFR-binding peptide
RIKPHQGQHQYNKLVKPKRGVLYLISIAS

SEQ ID NO: 99235 - protein, 29 aa, Artificial Sequence
  Cyclic GFR-binding peptide
RIKPHQGQHRYKKLIVNNSSDFYLVSIAN

SEQ ID NO: 99236 - protein, 29 aa, Artificial Sequence
  Cyclic GFR-binding peptide
RIKPHQGQHRYKKLIVNSSDDFYLVSIAN

SEQ ID NO: 99237 - protein, 29 aa, Artificial Sequence
  Cyclic GFR-binding peptide
RIKPHQGQHRHKRLVKPTRGVYYLISTAS

SEQ ID NO: 99238 - protein, 31 aa, Artificial Sequence
  Cyclic GFR-binding peptide
RIKPHQGQHYHYKLFIPKKRVIEKYLVSIPS

SEQ ID NO: 99239 - protein, 29 aa, Artificial Sequence
  Cyclic GFR-binding peptide
RIKPHQGQHRHKRLIKPTKGIYYLISTAS

SEQ ID NO: 99240 - protein, 29 aa, Artificial Sequence
  Cyclic GFR-binding peptide
RIKPHQGQHRHKRLTPVGMDDYYLVSTAS

SEQ ID NO: 99241 - protein, 29 aa, Artificial Sequence
  Cyclic GFR-binding peptide
RIKPHQGQHYHYKLTPVGMDDKYLVSIPS

SEQ ID NO: 99242 - protein, 29 aa, Artificial Sequence
  Cyclic GFR-binding peptide
RIKPHQGQHYHYKLIVNNSSDKYLVSIPS

SEQ ID NO: 99243 - protein, 29 aa, Artificial Sequence
  Cyclic GFR-binding peptide
RIKPHQGQHRHKRLIVNNSSDYYLVSTAS

SEQ ID NO: 99244 - protein, 29 aa, Artificial Sequence
  Cyclic GFR-binding peptide
RIKPHQGQHYHYKLVKPTRGVKYLISIPS

SEQ ID NO: 99245 - protein, 29 aa, Artificial Sequence
  Cyclic GFR-binding peptide
RIKPHQGQHRHKRLIVNSSDDYYLVSTAS

SEQ ID NO: 99246 - protein, 29 aa, Artificial Sequence
  Cyclic GFR-binding peptide
RIKPHQGQHRHKRLVVKDYEDYYLMSTAS

SEQ ID NO: 99247 - protein, 29 aa, Artificial Sequence
  Cyclic GFR-binding peptide
RIKPHQGQHQYNKLIKPTKGILYLISIAS

SEQ ID NO: 99248 - protein, 29 aa, Artificial Sequence
  Cyclic GFR-binding peptide
RIKPHQGQHQYNKLVVKDYEDLYLMSIAS

SEQ ID NO: 99249 - protein, 29 aa, Artificial Sequence
  Cyclic GFR-binding peptide
RIKPHQGQHQYNKLIVNSSDDLYLVSIAS

SEQ ID NO: 99250 - protein, 29 aa, Artificial Sequence
  Cyclic GFR-binding peptide
NAISILYFIGKTPKILKKYRRIKPHQGQH

SEQ ID NO: 99251 - protein, 31 aa, Artificial Sequence
  Cyclic GFR-binding peptide
SATSVLYYEIVRKKPIFLRKHRRIKPHQGQH

SEQ ID NO: 99252 - protein, 29 aa, Artificial Sequence
  Cyclic GFR-binding peptide
SPISMLYKDEYDKVVLKYHYRIKPHQGQH

SEQ ID NO: 99253 - protein, 29 aa, Artificial Sequence
  Cyclic GFR-binding peptide
SAISVLYLDSSNNVILKNYQRIKPHQGQH

SEQ ID NO: 99254 - protein, 29 aa, Artificial Sequence
  Cyclic GFR-binding peptide
NAISMLYFDEYDKVVLKKYRRIKPHQGQH

SEQ ID NO: 99255 - protein, 29 aa, Artificial Sequence
  Cyclic GFR-binding peptide
NAISILYFVGRTPKVLKKYRRIKPHQGQH

SEQ ID NO: 99256 - protein, 29 aa, Artificial Sequence
  Cyclic GFR-binding peptide
SATSMLYYDENEKVVLRKHRRIKPHQGQH

SEQ ID NO: 99257 - protein, 29 aa, Artificial Sequence
  Cyclic GFR-binding peptide
SPISILYKIGKTPKILKYHYRIKPHQGQH

SEQ ID NO: 99258 - protein, 31 aa, Artificial Sequence
  Cyclic GFR-binding peptide
NAISVLYFEIVRKKPIFLKKYRRIKPHQGQH

SEQ ID NO: 99259 - protein, 29 aa, Artificial Sequence
  Cyclic GFR-binding peptide
SPISMLYKDENEKVVLKYHYRIKPHQGQH

SEQ ID NO: 99260 - protein, 29 aa, Artificial Sequence
  Cyclic GFR-binding peptide
SATSILYYVGRKPKVLRKHRRIKPHQGQH

SEQ ID NO: 99261 - protein, 29 aa, Artificial Sequence
  Cyclic GFR-binding peptide
SPISILYKVGRKPKVLKYHYRIKPHQGQH

SEQ ID NO: 99262 - protein, 31 aa, Artificial Sequence
  Cyclic GFR-binding peptide
SAISVLYLEIVRKKPIFLKNYQRIKPHQGQH

SEQ ID NO: 99263 - protein, 29 aa, Artificial Sequence
  Cyclic GFR-binding peptide
SAISILYLVGRTPKVLKNYQRIKPHQGQH

SEQ ID NO: 99264 - protein, 29 aa, Artificial Sequence
  Cyclic GFR-binding peptide
NAISMLYFDENEKVVLKKYRRIKPHQGQH

SEQ ID NO: 99265 - protein, 29 aa, Artificial Sequence
  Cyclic GFR-binding peptide
SAISVLYLDDMGVPTLKNYQRIKPHQGQH

SEQ ID NO: 99266 - protein, 29 aa, Artificial Sequence
  Cyclic GFR-binding peptide
NAISVLYFDDMGVPTLKKYRRIKPHQGQH

SEQ ID NO: 99267 - protein, 29 aa, Artificial Sequence
  Cyclic GFR-binding peptide
NAISILYFVGRKPKVLKKYRRIKPHQGQH

SEQ ID NO: 99268 - protein, 29 aa, Artificial Sequence
  Cyclic GFR-binding peptide
SAISMLYLDENEKVVLKNYQRIKPHQGQH

SEQ ID NO: 99269 - protein, 29 aa, Artificial Sequence
  Cyclic GFR-binding peptide
SPISVLYKDDSSNVILKYHYRIKPHQGQH

SEQ ID NO: 99270 - protein, 29 aa, Artificial Sequence
  Cyclic GFR-binding peptide
SAISILYLVGRKPKVLKNYQRIKPHQGQH

SEQ ID NO: 99271 - protein, 29 aa, Artificial Sequence
  Cyclic GFR-binding peptide
NAISVLYFDSSNNVILKKYRRIKPHQGQH

SEQ ID NO: 99272 - protein, 29 aa, Artificial Sequence
  Cyclic GFR-binding peptide
NAISVLYFDDSSNVILKKYRRIKPHQGQH

SEQ ID NO: 99273 - protein, 29 aa, Artificial Sequence
  Cyclic GFR-binding peptide
SATSILYYVGRTPKVLRKHRRIKPHQGQH

SEQ ID NO: 99274 - protein, 31 aa, Artificial Sequence
  Cyclic GFR-binding peptide
SPISVLYKEIVRKKPIFLKYHYRIKPHQGQH

SEQ ID NO: 99275 - protein, 29 aa, Artificial Sequence
  Cyclic GFR-binding peptide
SATSILYYIGKTPKILRKHRRIKPHQGQH

SEQ ID NO: 99276 - protein, 29 aa, Artificial Sequence
  Cyclic GFR-binding peptide
SATSVLYYDDMGVPTLRKHRRIKPHQGQH

SEQ ID NO: 99277 - protein, 29 aa, Artificial Sequence
  Cyclic GFR-binding peptide
SPISVLYKDDMGVPTLKYHYRIKPHQGQH

SEQ ID NO: 99278 - protein, 29 aa, Artificial Sequence
  Cyclic GFR-binding peptide
SPISVLYKDSSNNVILKYHYRIKPHQGQH

SEQ ID NO: 99279 - protein, 29 aa, Artificial Sequence
  Cyclic GFR-binding peptide
SATSVLYYDSSNNVILRKHRRIKPHQGQH

SEQ ID NO: 99280 - protein, 29 aa, Artificial Sequence
  Cyclic GFR-binding peptide
SPISILYKVGRTPKVLKYHYRIKPHQGQH

SEQ ID NO: 99281 - protein, 29 aa, Artificial Sequence
  Cyclic GFR-binding peptide
SATSVLYYDDSSNVILRKHRRIKPHQGQH

SEQ ID NO: 99282 - protein, 29 aa, Artificial Sequence
  Cyclic GFR-binding peptide
SATSMLYYDEYDKVVLRKHRRIKPHQGQH

SEQ ID NO: 99283 - protein, 29 aa, Artificial Sequence
  Cyclic GFR-binding peptide
SAISILYLIGKTPKILKNYQRIKPHQGQH

SEQ ID NO: 99284 - protein, 29 aa, Artificial Sequence
  Cyclic GFR-binding peptide
SAISMLYLDEYDKVVLKNYQRIKPHQGQH

SEQ ID NO: 99285 - protein, 29 aa, Artificial Sequence
  Cyclic GFR-binding peptide
SAISVLYLDDSSNVILKNYQRIKPHQGQH

SEQ ID NO: 99286 - protein, 29 aa, Artificial Sequence
  Cyclic GFR-binding peptide
RIKPHQGQHNSLQEVVKDYEDYYLMTLPE

SEQ ID NO: 99287 - protein, 29 aa, Artificial Sequence
  Cyclic GFR-binding peptide
RIKPHQGQHNSLQEIKPTKGIYYVIPLPE

SEQ ID NO: 99288 - protein, 29 aa, Artificial Sequence
  Cyclic GFR-binding peptide
RIKPHQGQHNSLQEVKPKRGVYYLITLPE

SEQ ID NO: 99289 - protein, 29 aa, Artificial Sequence
  Cyclic GFR-binding peptide
RIKPHQGQHNSLQEVKPTRGVYYVIPLPE

SEQ ID NO: 99290 - protein, 29 aa, Artificial Sequence
  Cyclic GFR-binding peptide
RIKPHQGQHEYQKYIVNSSDDIFLVSIPS

SEQ ID NO: 99291 - protein, 29 aa, Artificial Sequence
  Cyclic GFR-binding peptide
RIKPHQGQHEYQKYVKPTRGVIFLISIPS

SEQ ID NO: 99292 - protein, 29 aa, Artificial Sequence
  Cyclic GFR-binding peptide
RIKPHQGQHNSLQEVVKENEDYYLMTLPE

SEQ ID NO: 99293 - protein, 29 aa, Artificial Sequence
  Cyclic GFR-binding peptide
RIKPHQGQHNSLQEVVNNASDYYLITLPE

SEQ ID NO: 99294 - protein, 29 aa, Artificial Sequence
  Cyclic GFR-binding peptide
RIKPHQGQHNSLQEVKPKRGVYYVIPLPE

SEQ ID NO: 99295 - protein, 29 aa, Artificial Sequence
  Cyclic GFR-binding peptide
RIKPHQGQHNSLQEVVNNASDYYVIPLPE

SEQ ID NO: 99296 - protein, 29 aa, Artificial Sequence
  Cyclic GFR-binding peptide
RIKPHQGQHNSLQEVKPTRGVYYLITLPE

SEQ ID NO: 99297 - protein, 29 aa, Artificial Sequence
  Cyclic GFR-binding peptide
RIKPHQGQHEYQKYIKPTKGIIFLISIPS

SEQ ID NO: 99298 - protein, 29 aa, Artificial Sequence
  Cyclic GFR-binding peptide
RIKPHQGQHEYQKYVVNNASDIFLISIPS

SEQ ID NO: 99299 - protein, 29 aa, Artificial Sequence
  Cyclic GFR-binding peptide
RIKPHQGQHNSLQEIVNSSDDYYVVPLPE

SEQ ID NO: 99300 - protein, 29 aa, Artificial Sequence
  Cyclic GFR-binding peptide
RIKPHQGQHNSLQEVVKDYEDYYVMPLPE

SEQ ID NO: 99301 - protein, 29 aa, Artificial Sequence
  Cyclic GFR-binding peptide
RIKPHQGQHEYQKYVVKENEDIFLMSIPS

SEQ ID NO: 99302 - protein, 29 aa, Artificial Sequence
  Cyclic GFR-binding peptide
RIKPHQGQHNSLQEVVKENEDYYVMPLPE

SEQ ID NO: 99303 - protein, 29 aa, Artificial Sequence
  Cyclic GFR-binding peptide
RIKPHQGQHEYQKYVVKDYEDIFLMSIPS

SEQ ID NO: 99304 - protein, 29 aa, Artificial Sequence
  Cyclic GFR-binding peptide
RIKPHQGQHQYNKLVVNNASDLYLISIAS

SEQ ID NO: 99305 - protein, 29 aa, Artificial Sequence
  Cyclic GFR-binding peptide
RIKPHQGQHNSLQEIKPTKGIYYLITLPE

SEQ ID NO: 99306 - protein, 29 aa, Artificial Sequence
  Cyclic GFR-binding peptide
RIKPHQGQHEYQKYVKPKRGVIFLISIPS

SEQ ID NO: 99307 - protein, 29 aa, Artificial Sequence
  Cyclic GFR-binding peptide
RIKPHQGQHRYKKLVVNNASDFYLISIAN

SEQ ID NO: 99308 - protein, 29 aa, Artificial Sequence
  Cyclic GFR-binding peptide
RIKPHQGQHNSLQEIVNSSDDYYLVTLPE

SEQ ID NO: 99309 - protein, 29 aa, Artificial Sequence
  Cyclic GFR-binding peptide
EPLTMLYYDEYDKVVEQLSNRIKPHQGQH

SEQ ID NO: 99310 - protein, 29 aa, Artificial Sequence
  Cyclic GFR-binding peptide
EPLPIVYYIGKTPKIEQLSNRIKPHQGQH

SEQ ID NO: 99311 - protein, 29 aa, Artificial Sequence
  Cyclic GFR-binding peptide
EPLTILYYVGRKPKVEQLSNRIKPHQGQH

SEQ ID NO: 99312 - protein, 29 aa, Artificial Sequence
  Cyclic GFR-binding peptide
EPLPIVYYVGRTPKVEQLSNRIKPHQGQH

SEQ ID NO: 99313 - protein, 29 aa, Artificial Sequence
  Cyclic GFR-binding peptide
SPISVLFIDDSSNVIYKQYERIKPHQGQH

SEQ ID NO: 99314 - protein, 29 aa, Artificial Sequence
  Cyclic GFR-binding peptide
SPISILFIVGRTPKVYKQYERIKPHQGQH

SEQ ID NO: 99315 - protein, 29 aa, Artificial Sequence
  Cyclic GFR-binding peptide
EPLTMLYYDENEKVVEQLSNRIKPHQGQH

SEQ ID NO: 99316 - protein, 29 aa, Artificial Sequence
  Cyclic GFR-binding peptide
EPLTILYYDSANNVVEQLSNRIKPHQGQH

SEQ ID NO: 99317 - protein, 29 aa, Artificial Sequence
  Cyclic GFR-binding peptide
EPLPIVYYVGRKPKVEQLSNRIKPHQGQH

SEQ ID NO: 99318 - protein, 29 aa, Artificial Sequence
  Cyclic GFR-binding peptide
EPLPIVYYDSANNVVEQLSNRIKPHQGQH

SEQ ID NO: 99319 - protein, 29 aa, Artificial Sequence
  Cyclic GFR-binding peptide
EPLTILYYVGRTPKVEQLSNRIKPHQGQH

SEQ ID NO: 99320 - protein, 29 aa, Artificial Sequence
  Cyclic GFR-binding peptide
SPISILFIIGKTPKIYKQYERIKPHQGQH

SEQ ID NO: 99321 - protein, 29 aa, Artificial Sequence
  Cyclic GFR-binding peptide
SPISILFIDSANNVVYKQYERIKPHQGQH

SEQ ID NO: 99322 - protein, 29 aa, Artificial Sequence
  Cyclic GFR-binding peptide
EPLPVVYYDDSSNVIEQLSNRIKPHQGQH

SEQ ID NO: 99323 - protein, 29 aa, Artificial Sequence
  Cyclic GFR-binding peptide
EPLPMVYYDEYDKVVEQLSNRIKPHQGQH

SEQ ID NO: 99324 - protein, 29 aa, Artificial Sequence
  Cyclic GFR-binding peptide
SPISMLFIDENEKVVYKQYERIKPHQGQH

SEQ ID NO: 99325 - protein, 29 aa, Artificial Sequence
  Cyclic GFR-binding peptide
EPLPMVYYDENEKVVEQLSNRIKPHQGQH

SEQ ID NO: 99326 - protein, 29 aa, Artificial Sequence
  Cyclic GFR-binding peptide
SPISMLFIDEYDKVVYKQYERIKPHQGQH

SEQ ID NO: 99327 - protein, 29 aa, Artificial Sequence
  Cyclic GFR-binding peptide
SAISILYLDSANNVVLKNYQRIKPHQGQH

SEQ ID NO: 99328 - protein, 29 aa, Artificial Sequence
  Cyclic GFR-binding peptide
EPLTILYYIGKTPKIEQLSNRIKPHQGQH

SEQ ID NO: 99329 - protein, 29 aa, Artificial Sequence
  Cyclic GFR-binding peptide
SPISILFIVGRKPKVYKQYERIKPHQGQH

SEQ ID NO: 99330 - protein, 29 aa, Artificial Sequence
  Cyclic GFR-binding peptide
NAISILYFDSANNVVLKKYRRIKPHQGQH

SEQ ID NO: 99331 - protein, 29 aa, Artificial Sequence
  Cyclic GFR-binding peptide
EPLTVLYYDDSSNVIEQLSNRIKPHQGQH

SEQ ID NO: 99332 - protein, 31 aa, Artificial Sequence
  Cyclic GFR-binding peptide
RIKPHQGQHVTAKKLKPKKRVYEIKRVQVPR

SEQ ID NO: 99333 - protein, 31 aa, Artificial Sequence
  Cyclic GFR-binding peptide
RIKPHQGQHVQVEKLKPKKRVYEVKAVKVSR

SEQ ID NO: 99334 - protein, 31 aa, Artificial Sequence
  Cyclic GFR-binding peptide
RIKPHQGQHVQVEKFIPKKRVIEVKAVKVSR

SEQ ID NO: 99335 - protein, 31 aa, Artificial Sequence
  Cyclic GFR-binding peptide
RIKPHQGQHVQVEKHQGQHPKIRVKAMKVSR

SEQ ID NO: 99336 - protein, 31 aa, Artificial Sequence
  Cyclic GFR-binding peptide
RIKPHQGQHVTAKKHQGQHPKIRIKRMQVPR

SEQ ID NO: 99337 - protein, 31 aa, Artificial Sequence
  Cyclic GFR-binding peptide
RIKPHQGQHSMEGLLKPKKRVYEMIQVTINS

SEQ ID NO: 99338 - protein, 31 aa, Artificial Sequence
  Cyclic GFR-binding peptide
RIKPHQGQHSMEGIFIPKKRVIEMIQVTINS

SEQ ID NO: 99339 - protein, 31 aa, Artificial Sequence
  Cyclic GFR-binding peptide
RIKPHQGQHSMEGLHQGQHPKIRMIQMTINS

SEQ ID NO: 99340 - protein, 31 aa, Artificial Sequence
  Cyclic GFR-binding peptide
RIKPHQGQHSMEGILKPKKRVYEMIQVTINS

SEQ ID NO: 99341 - protein, 31 aa, Artificial Sequence
  Cyclic GFR-binding peptide
RIKPHQGQHSMEGLFIPKKRVIEMIQVTINS

SEQ ID NO: 99342 - protein, 31 aa, Artificial Sequence
  Cyclic GFR-binding peptide
RIKPHQGQHVTAKKFIPKKRVIEIKRVQVPR

SEQ ID NO: 99343 - protein, 31 aa, Artificial Sequence
  Cyclic GFR-binding peptide
RIKPHQGQHSMEGIHQGQHPKIRMIQMTINS

SEQ ID NO: 99344 - protein, 31 aa, Artificial Sequence
  Cyclic GFR-binding peptide
RPVQVRKIEYVRKKPKLKKATVRIKPHQGQH

SEQ ID NO: 99345 - protein, 31 aa, Artificial Sequence
  Cyclic GFR-binding peptide
RSVKVAKVEYVRKKPKLKEVQVRIKPHQGQH

SEQ ID NO: 99346 - protein, 31 aa, Artificial Sequence
  Cyclic GFR-binding peptide
RSVKVAKVEIVRKKPIFKEVQVRIKPHQGQH

SEQ ID NO: 99347 - protein, 31 aa, Artificial Sequence
  Cyclic GFR-binding peptide
RSVKMAKVRIKPHQGQHKEVQVRIKPHQGQH

SEQ ID NO: 99348 - protein, 31 aa, Artificial Sequence
  Cyclic GFR-binding peptide
RPVQMRKIRIKPHQGQHKKATVRIKPHQGQH

SEQ ID NO: 99349 - protein, 31 aa, Artificial Sequence
  Cyclic GFR-binding peptide
SNITVQIMEYVRKKPKLLGEMSRIKPHQGQH

SEQ ID NO: 99350 - protein, 31 aa, Artificial Sequence
  Cyclic GFR-binding peptide
SNITVQIMEIVRKKPIFIGEMSRIKPHQGQH

SEQ ID NO: 99351 - protein, 31 aa, Artificial Sequence
  Cyclic GFR-binding peptide
SNITMQIMRIKPHQGQHLGEMSRIKPHQGQH

SEQ ID NO: 99352 - protein, 31 aa, Artificial Sequence
  Cyclic GFR-binding peptide
SNITVQIMEYVRKKPKLIGEMSRIKPHQGQH

SEQ ID NO: 99353 - protein, 31 aa, Artificial Sequence
  Cyclic GFR-binding peptide
SNITVQIMEIVRKKPIFLGEMSRIKPHQGQH

SEQ ID NO: 99354 - protein, 31 aa, Artificial Sequence
  Cyclic GFR-binding peptide
RPVQVRKIEIVRKKPIFKKATVRIKPHQGQH

SEQ ID NO: 99355 - protein, 31 aa, Artificial Sequence
  Cyclic GFR-binding peptide
SNITMQIMRIKPHQGQHIGEMSRIKPHQGQH

SEQ ID NO: 99356 - protein, 29 aa, Artificial Sequence
  Cyclic GFR-binding peptide
RIKPHQGQHEYKFKVKPTRGVLYLISIPE

SEQ ID NO: 99357 - protein, 29 aa, Artificial Sequence
  Cyclic GFR-binding peptide
RIKPHQGQHEYKFKTPVGMDDLYLVSIPE

SEQ ID NO: 99358 - protein, 29 aa, Artificial Sequence
  Cyclic GFR-binding peptide
RIKPHQGQHEYQKYVKPKRGVIYLISIPS

SEQ ID NO: 99359 - protein, 29 aa, Artificial Sequence
  Cyclic GFR-binding peptide
RIKPHQGQHEYQKYVVKDYEDIYLMSIPS

SEQ ID NO: 99360 - protein, 29 aa, Artificial Sequence
  Cyclic GFR-binding peptide
RIKPHQGQHEYKFKIKPTKGILYLISIPE

SEQ ID NO: 99361 - protein, 29 aa, Artificial Sequence
  Cyclic GFR-binding peptide
RIKPHQGQHYHYKLYTVVGKDKYLISIPS

SEQ ID NO: 99362 - protein, 29 aa, Artificial Sequence
  Cyclic GFR-binding peptide
RIKPHQGQHRYKKLYTVVGKDFYLISIAN

SEQ ID NO: 99363 - protein, 29 aa, Artificial Sequence
  Cyclic GFR-binding peptide
RIKPHQGQHEYQKYVVNNAADIYLISIPS

SEQ ID NO: 99364 - protein, 29 aa, Artificial Sequence
  Cyclic GFR-binding peptide
RIKPHQGQHEYQKYVKPTRGVIYLISIPS

SEQ ID NO: 99365 - protein, 29 aa, Artificial Sequence
  Cyclic GFR-binding peptide
RIKPHQGQHEYQKYTPVGMDDIYLVSIPS

SEQ ID NO: 99366 - protein, 29 aa, Artificial Sequence
  Cyclic GFR-binding peptide
RIKPHQGQHEYKFKVVKDYEDLYLMSIPE

SEQ ID NO: 99367 - protein, 29 aa, Artificial Sequence
  Cyclic GFR-binding peptide
RIKPHQGQHEYKFKVVNNAADLYLISIPE

SEQ ID NO: 99368 - protein, 29 aa, Artificial Sequence
  Cyclic GFR-binding peptide
RIKPHQGQHEYQKYVVKENEDIYLMSIPS

SEQ ID NO: 99369 - protein, 29 aa, Artificial Sequence
  Cyclic GFR-binding peptide
RIKPHQGQHEYQKYIKPTKGIIYLISIPS

SEQ ID NO: 99370 - protein, 29 aa, Artificial Sequence
  Cyclic GFR-binding peptide
RIKPHQGQHRYKKLVVNNAADFYLISIAN

SEQ ID NO: 99371 - protein, 29 aa, Artificial Sequence
  Cyclic GFR-binding peptide
RIKPHQGQHYHYKLVVNNAADKYLISIPS

SEQ ID NO: 99372 - protein, 29 aa, Artificial Sequence
  Cyclic GFR-binding peptide
RIKPHQGQHEYKFKIVNNSSDLYLVSIPE

SEQ ID NO: 99373 - protein, 29 aa, Artificial Sequence
  Cyclic GFR-binding peptide
RIKPHQGQHEYQKYIVNSSDDIYLVSIPS

SEQ ID NO: 99374 - protein, 29 aa, Artificial Sequence
  Cyclic GFR-binding peptide
RIKPHQGQHEYKFKIVNSSDDLYLVSIPE

SEQ ID NO: 99375 - protein, 29 aa, Artificial Sequence
  Cyclic GFR-binding peptide
RIKPHQGQHEYKFKVKPKRGVLYLISIPE

SEQ ID NO: 99376 - protein, 29 aa, Artificial Sequence
  Cyclic GFR-binding peptide
RIKPHQGQHEYQKYYTVVGKDIYLISIPS

SEQ ID NO: 99377 - protein, 29 aa, Artificial Sequence
  Cyclic GFR-binding peptide
RIKPHQGQHEYKFKVVKENEDLYLMSIPE

SEQ ID NO: 99378 - protein, 29 aa, Artificial Sequence
  Cyclic GFR-binding peptide
RIKPHQGQHEYQKYIVNNSSDIYLVSIPS

SEQ ID NO: 99379 - protein, 29 aa, Artificial Sequence
  Cyclic GFR-binding peptide
RIKPHQGQHEYKFKYTVVGKDLYLISIPE

SEQ ID NO: 99380 - protein, 29 aa, Artificial Sequence
  Cyclic GFR-binding peptide
EPISILYLVGRTPKVKFKYERIKPHQGQH

SEQ ID NO: 99381 - protein, 29 aa, Artificial Sequence
  Cyclic GFR-binding peptide
EPISVLYLDDMGVPTKFKYERIKPHQGQH

SEQ ID NO: 99382 - protein, 29 aa, Artificial Sequence
  Cyclic GFR-binding peptide
SPISILYIVGRKPKVYKQYERIKPHQGQH

SEQ ID NO: 99383 - protein, 29 aa, Artificial Sequence
  Cyclic GFR-binding peptide
SPISMLYIDEYDKVVYKQYERIKPHQGQH

SEQ ID NO: 99384 - protein, 29 aa, Artificial Sequence
  Cyclic GFR-binding peptide
EPISILYLIGKTPKIKFKYERIKPHQGQH

SEQ ID NO: 99385 - protein, 29 aa, Artificial Sequence
  Cyclic GFR-binding peptide
SPISILYKDKGVVTYLKYHYRIKPHQGQH

SEQ ID NO: 99386 - protein, 29 aa, Artificial Sequence
  Cyclic GFR-binding peptide
NAISILYFDKGVVTYLKKYRRIKPHQGQH

SEQ ID NO: 99387 - protein, 29 aa, Artificial Sequence
  Cyclic GFR-binding peptide
SPISILYIDAANNVVYKQYERIKPHQGQH

SEQ ID NO: 99388 - protein, 29 aa, Artificial Sequence
  Cyclic GFR-binding peptide
SPISILYIVGRTPKVYKQYERIKPHQGQH

SEQ ID NO: 99389 - protein, 29 aa, Artificial Sequence
  Cyclic GFR-binding peptide
SPISVLYIDDMGVPTYKQYERIKPHQGQH

SEQ ID NO: 99390 - protein, 29 aa, Artificial Sequence
  Cyclic GFR-binding peptide
EPISMLYLDEYDKVVKFKYERIKPHQGQH

SEQ ID NO: 99391 - protein, 29 aa, Artificial Sequence
  Cyclic GFR-binding peptide
EPISILYLDAANNVVKFKYERIKPHQGQH

SEQ ID NO: 99392 - protein, 29 aa, Artificial Sequence
  Cyclic GFR-binding peptide
SPISMLYIDENEKVVYKQYERIKPHQGQH

SEQ ID NO: 99393 - protein, 29 aa, Artificial Sequence
  Cyclic GFR-binding peptide
SPISILYIIGKTPKIYKQYERIKPHQGQH

SEQ ID NO: 99394 - protein, 29 aa, Artificial Sequence
  Cyclic GFR-binding peptide
NAISILYFDAANNVVLKKYRRIKPHQGQH

SEQ ID NO: 99395 - protein, 29 aa, Artificial Sequence
  Cyclic GFR-binding peptide
SPISILYKDAANNVVLKYHYRIKPHQGQH

SEQ ID NO: 99396 - protein, 29 aa, Artificial Sequence
  Cyclic GFR-binding peptide
EPISVLYLDSSNNVIKFKYERIKPHQGQH

SEQ ID NO: 99397 - protein, 29 aa, Artificial Sequence
  Cyclic GFR-binding peptide
SPISVLYIDDSSNVIYKQYERIKPHQGQH

SEQ ID NO: 99398 - protein, 29 aa, Artificial Sequence
  Cyclic GFR-binding peptide
EPISVLYLDDSSNVIKFKYERIKPHQGQH

SEQ ID NO: 99399 - protein, 29 aa, Artificial Sequence
  Cyclic GFR-binding peptide
EPISILYLVGRKPKVKFKYERIKPHQGQH

SEQ ID NO: 99400 - protein, 29 aa, Artificial Sequence
  Cyclic GFR-binding peptide
SPISILYIDKGVVTYYKQYERIKPHQGQH

SEQ ID NO: 99401 - protein, 29 aa, Artificial Sequence
  Cyclic GFR-binding peptide
EPISMLYLDENEKVVKFKYERIKPHQGQH

SEQ ID NO: 99402 - protein, 29 aa, Artificial Sequence
  Cyclic GFR-binding peptide
SPISVLYIDSSNNVIYKQYERIKPHQGQH

SEQ ID NO: 99403 - protein, 29 aa, Artificial Sequence
  Cyclic GFR-binding peptide
EPISILYLDKGVVTYKFKYERIKPHQGQH

SEQ ID NO: 99404 - protein, 29 aa, Artificial Sequence
  Cyclic GFR-binding peptide
RIKPHQGQHPIKGYIIQQKDNFYLMNIPS

SEQ ID NO: 99405 - protein, 29 aa, Artificial Sequence
  Cyclic GFR-binding peptide
RIKPHQGQHPIKGYVVKDYEDFYLMNIPS

SEQ ID NO: 99406 - protein, 29 aa, Artificial Sequence
  Cyclic GFR-binding peptide
RIKPHQGQHPIKGYIVNSSDDFYLVNIPS

SEQ ID NO: 99407 - protein, 29 aa, Artificial Sequence
  Cyclic GFR-binding peptide
RIKPHQGQHPIKGYVVNNAADFYLINIPS

SEQ ID NO: 99408 - protein, 29 aa, Artificial Sequence
  Cyclic GFR-binding peptide
RIKPHQGQHPIKGYYTVVGKDFYLINIPS

SEQ ID NO: 99409 - protein, 29 aa, Artificial Sequence
  Cyclic GFR-binding peptide
RIKPHQGQHPIKGYLLVRGNDFYLMNIPS

SEQ ID NO: 99410 - protein, 29 aa, Artificial Sequence
  Cyclic GFR-binding peptide
RIKPHQGQHPIKGYVVKENEDFYLMNIPS

SEQ ID NO: 99411 - protein, 29 aa, Artificial Sequence
  Cyclic GFR-binding peptide
RIKPHQGQHPIKGYVVNNASDFYLINIPS

SEQ ID NO: 99412 - protein, 29 aa, Artificial Sequence
  Cyclic GFR-binding peptide
RIKPHQGQHPIKGYTPVGMDDFYLVNIPS

SEQ ID NO: 99413 - protein, 29 aa, Artificial Sequence
  Cyclic GFR-binding peptide
RIKPHQGQHPIKGYIVNNSSDFYLVNIPS

SEQ ID NO: 99414 - protein, 29 aa, Artificial Sequence
  Cyclic GFR-binding peptide
SPINMLYFNDKQQIIYGKIPRIKPHQGQH

SEQ ID NO: 99415 - protein, 29 aa, Artificial Sequence
  Cyclic GFR-binding peptide
SPINMLYFDEYDKVVYGKIPRIKPHQGQH

SEQ ID NO: 99416 - protein, 29 aa, Artificial Sequence
  Cyclic GFR-binding peptide
SPINVLYFDDSSNVIYGKIPRIKPHQGQH

SEQ ID NO: 99417 - protein, 29 aa, Artificial Sequence
  Cyclic GFR-binding peptide
SPINILYFDAANNVVYGKIPRIKPHQGQH

SEQ ID NO: 99418 - protein, 29 aa, Artificial Sequence
  Cyclic GFR-binding peptide
SPINILYFDKGVVTYYGKIPRIKPHQGQH

SEQ ID NO: 99419 - protein, 29 aa, Artificial Sequence
  Cyclic GFR-binding peptide
SPINMLYFDNGRVLLYGKIPRIKPHQGQH

SEQ ID NO: 99420 - protein, 29 aa, Artificial Sequence
  Cyclic GFR-binding peptide
SPINMLYFDENEKVVYGKIPRIKPHQGQH

SEQ ID NO: 99421 - protein, 29 aa, Artificial Sequence
  Cyclic GFR-binding peptide
SPINILYFDSANNVVYGKIPRIKPHQGQH

SEQ ID NO: 99422 - protein, 29 aa, Artificial Sequence
  Cyclic GFR-binding peptide
SPINVLYFDDMGVPTYGKIPRIKPHQGQH

SEQ ID NO: 99423 - protein, 29 aa, Artificial Sequence
  Cyclic GFR-binding peptide
SPINVLYFDSSNNVIYGKIPRIKPHQGQH

SEQ ID NO: 99424 - protein, 29 aa, Artificial Sequence
  Cyclic GFR-binding peptide
RIKPHQGQHEYQKYVVNNASDIYLISIPS

SEQ ID NO: 99425 - protein, 29 aa, Artificial Sequence
  Cyclic GFR-binding peptide
RIKPHQGQHEYQKYIIQQKDNIYLMSIPS

SEQ ID NO: 99426 - protein, 29 aa, Artificial Sequence
  Cyclic GFR-binding peptide
RIKPHQGQHEYQKYLLVRGNDIYLMSIPS

SEQ ID NO: 99427 - protein, 29 aa, Artificial Sequence
  Cyclic GFR-binding peptide
SPISILYIDSANNVVYKQYERIKPHQGQH

SEQ ID NO: 99428 - protein, 29 aa, Artificial Sequence
  Cyclic GFR-binding peptide
SPISMLYINDKQQIIYKQYERIKPHQGQH

SEQ ID NO: 99429 - protein, 29 aa, Artificial Sequence
  Cyclic GFR-binding peptide
SPISMLYIDNGRVLLYKQYERIKPHQGQH

SEQ ID NO: 99430 - protein, 29 aa, Artificial Sequence
  Cyclic GFR-binding peptide
RIKPHQGQHPYVKLYTVVGKDFFLISLSS

SEQ ID NO: 99431 - protein, 29 aa, Artificial Sequence
  Cyclic GFR-binding peptide
RIKPHQGQHPYVKLIKPTKGIFFLISLSS

SEQ ID NO: 99432 - protein, 29 aa, Artificial Sequence
  Cyclic GFR-binding peptide
RIKPHQGQHPYVKLIIQQKDNFFLMSLSS

SEQ ID NO: 99433 - protein, 29 aa, Artificial Sequence
  Cyclic GFR-binding peptide
RIKPHQGQHPYVKLIVNSSDDFFLVSLSS

SEQ ID NO: 99434 - protein, 29 aa, Artificial Sequence
  Cyclic GFR-binding peptide
RIKPHQGQHPYVKLVKPKRGVFFLISLSS

SEQ ID NO: 99435 - protein, 29 aa, Artificial Sequence
  Cyclic GFR-binding peptide
RIKPHQGQHPYVKLVKPTRGVFFLISLSS

SEQ ID NO: 99436 - protein, 29 aa, Artificial Sequence
  Cyclic GFR-binding peptide
RIKPHQGQHPYVKLTPVGMDDFFLVSLSS

SEQ ID NO: 99437 - protein, 31 aa, Artificial Sequence
  Cyclic GFR-binding peptide
RIKPHQGQHPYVKLHQGQHPKIRFFLMSLSS

SEQ ID NO: 99438 - protein, 29 aa, Artificial Sequence
  Cyclic GFR-binding peptide
RIKPHQGQHPYVKLVVNKNEDFFLISLSS

SEQ ID NO: 99439 - protein, 29 aa, Artificial Sequence
  Cyclic GFR-binding peptide
RIKPHQGQHPYVKLVVNNASDFFLISLSS

SEQ ID NO: 99440 - protein, 29 aa, Artificial Sequence
  Cyclic GFR-binding peptide
RIKPHQGQHPYVKLVVKENEDFFLMSLSS

SEQ ID NO: 99441 - protein, 29 aa, Artificial Sequence
  Cyclic GFR-binding peptide
RIKPHQGQHPYVKLIVNNSSDFFLVSLSS

SEQ ID NO: 99442 - protein, 31 aa, Artificial Sequence
  Cyclic GFR-binding peptide
RIKPHQGQHPYVKLLKPKKRVYEFFLVSLSS

SEQ ID NO: 99443 - protein, 29 aa, Artificial Sequence
  Cyclic GFR-binding peptide
RIKPHQGQHPYVKLLLVRGNDFFLMSLSS

SEQ ID NO: 99444 - protein, 29 aa, Artificial Sequence
  Cyclic GFR-binding peptide
RIKPHQGQHPYVKLVVKDYEDFFLMSLSS

SEQ ID NO: 99445 - protein, 29 aa, Artificial Sequence
  Cyclic GFR-binding peptide
RIKPHQGQHPYVKLVVNNAADFFLISLSS

SEQ ID NO: 99446 - protein, 29 aa, Artificial Sequence
  Cyclic GFR-binding peptide
SSLSILFFDKGVVTYLKVYPRIKPHQGQH

SEQ ID NO: 99447 - protein, 29 aa, Artificial Sequence
  Cyclic GFR-binding peptide
SSLSILFFIGKTPKILKVYPRIKPHQGQH

SEQ ID NO: 99448 - protein, 29 aa, Artificial Sequence
  Cyclic GFR-binding peptide
SSLSMLFFNDKQQIILKVYPRIKPHQGQH

SEQ ID NO: 99449 - protein, 29 aa, Artificial Sequence
  Cyclic GFR-binding peptide
SSLSVLFFDDSSNVILKVYPRIKPHQGQH

SEQ ID NO: 99450 - protein, 29 aa, Artificial Sequence
  Cyclic GFR-binding peptide
SSLSILFFVGRKPKVLKVYPRIKPHQGQH

SEQ ID NO: 99451 - protein, 29 aa, Artificial Sequence
  Cyclic GFR-binding peptide
SSLSILFFVGRTPKVLKVYPRIKPHQGQH

SEQ ID NO: 99452 - protein, 29 aa, Artificial Sequence
  Cyclic GFR-binding peptide
SSLSVLFFDDMGVPTLKVYPRIKPHQGQH

SEQ ID NO: 99453 - protein, 31 aa, Artificial Sequence
  Cyclic GFR-binding peptide
SSLSMLFFRIKPHQGQHLKVYPRIKPHQGQH

SEQ ID NO: 99454 - protein, 29 aa, Artificial Sequence
  Cyclic GFR-binding peptide
SSLSILFFDENKNVVLKVYPRIKPHQGQH

SEQ ID NO: 99455 - protein, 29 aa, Artificial Sequence
  Cyclic GFR-binding peptide
SSLSILFFDSANNVVLKVYPRIKPHQGQH

SEQ ID NO: 99456 - protein, 29 aa, Artificial Sequence
  Cyclic GFR-binding peptide
SSLSMLFFDENEKVVLKVYPRIKPHQGQH

SEQ ID NO: 99457 - protein, 29 aa, Artificial Sequence
  Cyclic GFR-binding peptide
SSLSVLFFDSSNNVILKVYPRIKPHQGQH

SEQ ID NO: 99458 - protein, 31 aa, Artificial Sequence
  Cyclic GFR-binding peptide
SSLSVLFFEYVRKKPKLLKVYPRIKPHQGQH

SEQ ID NO: 99459 - protein, 29 aa, Artificial Sequence
  Cyclic GFR-binding peptide
SSLSMLFFDNGRVLLLKVYPRIKPHQGQH

SEQ ID NO: 99460 - protein, 29 aa, Artificial Sequence
  Cyclic GFR-binding peptide
SSLSMLFFDEYDKVVLKVYPRIKPHQGQH

SEQ ID NO: 99461 - protein, 29 aa, Artificial Sequence
  Cyclic GFR-binding peptide
SSLSILFFDAANNVVLKVYPRIKPHQGQH

SEQ ID NO: 99462 - protein, 29 aa, Artificial Sequence
  Cyclic GFR-binding peptide
RIKPHQGQHSMEGIIVNSSDDMIQVTINS

SEQ ID NO: 99463 - protein, 29 aa, Artificial Sequence
  Cyclic GFR-binding peptide
RIKPHQGQHVTAKKVVKENEDIKRMQVPR

SEQ ID NO: 99464 - protein, 29 aa, Artificial Sequence
  Cyclic GFR-binding peptide
RIKPHQGQHSMEGIVVKDYEDMIQMTINS

SEQ ID NO: 99465 - protein, 29 aa, Artificial Sequence
  Cyclic GFR-binding peptide
RIKPHQGQHVTAKKIKPTKGIIKRIQVPR

SEQ ID NO: 99466 - protein, 29 aa, Artificial Sequence
  Cyclic GFR-binding peptide
RIKPHQGQHSMEGIVKPTRGVMIQITINS

SEQ ID NO: 99467 - protein, 31 aa, Artificial Sequence
  Cyclic GFR-binding peptide
RIKPHQGQHNSLQEFIPKKRVIEYYVVPLPE

SEQ ID NO: 99468 - protein, 29 aa, Artificial Sequence
  Cyclic GFR-binding peptide
RIKPHQGQHVQVEKVKPKRGVVKAIKVSR

SEQ ID NO: 99469 - protein, 29 aa, Artificial Sequence
  Cyclic GFR-binding peptide
RIKPHQGQHVQVEKVVKENEDVKAMKVSR

SEQ ID NO: 99470 - protein, 29 aa, Artificial Sequence
  Cyclic GFR-binding peptide
RIKPHQGQHVTAKKIVNSSDDIKRVQVPR

SEQ ID NO: 99471 - protein, 29 aa, Artificial Sequence
  Cyclic GFR-binding peptide
RIKPHQGQHVQVEKIKPTKGIVKAIKVSR

SEQ ID NO: 99472 - protein, 31 aa, Artificial Sequence
  Cyclic GFR-binding peptide
RIKPHQGQHNSLQEFIPKKRVIEYYLVTLPE

SEQ ID NO: 99473 - protein, 29 aa, Artificial Sequence
  Cyclic GFR-binding peptide
RIKPHQGQHVQVEKIVNSSDDVKAVKVSR

SEQ ID NO: 99474 - protein, 29 aa, Artificial Sequence
  Cyclic GFR-binding peptide
RIKPHQGQHVTAKKVKPKRGVIKRIQVPR

SEQ ID NO: 99475 - protein, 29 aa, Artificial Sequence
  Cyclic GFR-binding peptide
RIKPHQGQHVQVEKVKPTRGVVKAIKVSR

SEQ ID NO: 99476 - protein, 29 aa, Artificial Sequence
  Cyclic GFR-binding peptide
RIKPHQGQHVTAKKVKPTRGVIKRIQVPR

SEQ ID NO: 99477 - protein, 31 aa, Artificial Sequence
  Cyclic GFR-binding peptide
RIKPHQGQHNSLQELKPKKRVYEYYLVTLPE

SEQ ID NO: 99478 - protein, 29 aa, Artificial Sequence
  Cyclic GFR-binding peptide
RIKPHQGQHSMEGIVKPKRGVMIQITINS

SEQ ID NO: 99479 - protein, 29 aa, Artificial Sequence
  Cyclic GFR-binding peptide
RIKPHQGQHSMEGIVVKENEDMIQMTINS

SEQ ID NO: 99480 - protein, 29 aa, Artificial Sequence
  Cyclic GFR-binding peptide
RIKPHQGQHSMEGIIKPTKGIMIQITINS

SEQ ID NO: 99481 - protein, 31 aa, Artificial Sequence
  Cyclic GFR-binding peptide
RIKPHQGQHNSLQEHQGQHPKIRYYLMTLPE

SEQ ID NO: 99482 - protein, 29 aa, Artificial Sequence
  Cyclic GFR-binding peptide
RIKPHQGQHVTAKKVVKDYEDIKRMQVPR

SEQ ID NO: 99483 - protein, 31 aa, Artificial Sequence
  Cyclic GFR-binding peptide
RIKPHQGQHNSLQEHQGQHPKIRYYVMPLPE

SEQ ID NO: 99484 - protein, 31 aa, Artificial Sequence
  Cyclic GFR-binding peptide
RIKPHQGQHNSLQELKPKKRVYEYYVVPLPE

SEQ ID NO: 99485 - protein, 29 aa, Artificial Sequence
  Cyclic GFR-binding peptide
RIKPHQGQHVQVEKVVKDYEDVKAMKVSR

SEQ ID NO: 99486 - protein, 29 aa, Artificial Sequence
  Cyclic GFR-binding peptide
SNITVQIMDDSSNVIIGEMSRIKPHQGQH

SEQ ID NO: 99487 - protein, 29 aa, Artificial Sequence
  Cyclic GFR-binding peptide
RPVQMRKIDENEKVVKKATVRIKPHQGQH

SEQ ID NO: 99488 - protein, 29 aa, Artificial Sequence
  Cyclic GFR-binding peptide
SNITMQIMDEYDKVVIGEMSRIKPHQGQH

SEQ ID NO: 99489 - protein, 29 aa, Artificial Sequence
  Cyclic GFR-binding peptide
RPVQIRKIIGKTPKIKKATVRIKPHQGQH

SEQ ID NO: 99490 - protein, 29 aa, Artificial Sequence
  Cyclic GFR-binding peptide
SNITIQIMVGRTPKVIGEMSRIKPHQGQH

SEQ ID NO: 99491 - protein, 31 aa, Artificial Sequence
  Cyclic GFR-binding peptide
EPLPVVYYEIVRKKPIFEQLSNRIKPHQGQH

SEQ ID NO: 99492 - protein, 29 aa, Artificial Sequence
  Cyclic GFR-binding peptide
RSVKIAKVVGRKPKVKEVQVRIKPHQGQH

SEQ ID NO: 99493 - protein, 29 aa, Artificial Sequence
  Cyclic GFR-binding peptide
RSVKMAKVDENEKVVKEVQVRIKPHQGQH

SEQ ID NO: 99494 - protein, 29 aa, Artificial Sequence
  Cyclic GFR-binding peptide
RPVQVRKIDDSSNVIKKATVRIKPHQGQH

SEQ ID NO: 99495 - protein, 29 aa, Artificial Sequence
  Cyclic GFR-binding peptide
RSVKIAKVIGKTPKIKEVQVRIKPHQGQH

SEQ ID NO: 99496 - protein, 31 aa, Artificial Sequence
  Cyclic GFR-binding peptide
EPLTVLYYEIVRKKPIFEQLSNRIKPHQGQH

SEQ ID NO: 99497 - protein, 29 aa, Artificial Sequence
  Cyclic GFR-binding peptide
RSVKVAKVDDSSNVIKEVQVRIKPHQGQH

SEQ ID NO: 99498 - protein, 29 aa, Artificial Sequence
  Cyclic GFR-binding peptide
RPVQIRKIVGRKPKVKKATVRIKPHQGQH

SEQ ID NO: 99499 - protein, 29 aa, Artificial Sequence
  Cyclic GFR-binding peptide
RSVKIAKVVGRTPKVKEVQVRIKPHQGQH

SEQ ID NO: 99500 - protein, 29 aa, Artificial Sequence
  Cyclic GFR-binding peptide
RPVQIRKIVGRTPKVKKATVRIKPHQGQH

SEQ ID NO: 99501 - protein, 31 aa, Artificial Sequence
  Cyclic GFR-binding peptide
EPLTVLYYEYVRKKPKLEQLSNRIKPHQGQH

SEQ ID NO: 99502 - protein, 29 aa, Artificial Sequence
  Cyclic GFR-binding peptide
SNITIQIMVGRKPKVIGEMSRIKPHQGQH

SEQ ID NO: 99503 - protein, 29 aa, Artificial Sequence
  Cyclic GFR-binding peptide
SNITMQIMDENEKVVIGEMSRIKPHQGQH

SEQ ID NO: 99504 - protein, 29 aa, Artificial Sequence
  Cyclic GFR-binding peptide
SNITIQIMIGKTPKIIGEMSRIKPHQGQH

SEQ ID NO: 99505 - protein, 31 aa, Artificial Sequence
  Cyclic GFR-binding peptide
EPLTMLYYRIKPHQGQHEQLSNRIKPHQGQH

SEQ ID NO: 99506 - protein, 29 aa, Artificial Sequence
  Cyclic GFR-binding peptide
RPVQMRKIDEYDKVVKKATVRIKPHQGQH

SEQ ID NO: 99507 - protein, 31 aa, Artificial Sequence
  Cyclic GFR-binding peptide
EPLPMVYYRIKPHQGQHEQLSNRIKPHQGQH

SEQ ID NO: 99508 - protein, 31 aa, Artificial Sequence
  Cyclic GFR-binding peptide
EPLPVVYYEYVRKKPKLEQLSNRIKPHQGQH

SEQ ID NO: 99509 - protein, 29 aa, Artificial Sequence
  Cyclic GFR-binding peptide
RSVKMAKVDEYDKVVKEVQVRIKPHQGQH

SEQ ID NO: 99510 - protein, 29 aa, Artificial Sequence
  Cyclic GFR-binding peptide
RIKPHQGQHRYKKLIIQQKDNFYLMSIAN

SEQ ID NO: 99511 - protein, 29 aa, Artificial Sequence
  Cyclic GFR-binding peptide
RIKPHQGQHRYKKLLLVRGNDFYLMSIAN

SEQ ID NO: 99512 - protein, 29 aa, Artificial Sequence
  Cyclic GFR-binding peptide
NAISMLYFNDKQQIILKKYRRIKPHQGQH

SEQ ID NO: 99513 - protein, 29 aa, Artificial Sequence
  Cyclic GFR-binding peptide
NAISMLYFDNGRVLLLKKYRRIKPHQGQH

SEQ ID NO: 99514 - protein, 29 aa, Artificial Sequence
  Cyclic GFR-binding peptide
RIKPHQGQHEYKFKVVNKNEDLYLISIPE

SEQ ID NO: 99515 - protein, 29 aa, Artificial Sequence
  Cyclic GFR-binding peptide
RIKPHQGQHPIKGYVKPTRGVFYLINIPS

SEQ ID NO: 99516 - protein, 29 aa, Artificial Sequence
  Cyclic GFR-binding peptide
RIKPHQGQHEYKFKLLVRGNDLYLMSIPE

SEQ ID NO: 99517 - protein, 29 aa, Artificial Sequence
  Cyclic GFR-binding peptide
RIKPHQGQHYHYKLVVNKNEDKYLISIPS

SEQ ID NO: 99518 - protein, 29 aa, Artificial Sequence
  Cyclic GFR-binding peptide
RIKPHQGQHRHKRLLLVRGNDYYLMSTAS

SEQ ID NO: 99519 - protein, 29 aa, Artificial Sequence
  Cyclic GFR-binding peptide
RIKPHQGQHYHYKLLLVRGNDKYLMSIPS

SEQ ID NO: 99520 - protein, 29 aa, Artificial Sequence
  Cyclic GFR-binding peptide
RIKPHQGQHRHKRLVVNKNEDYYLISTAS

SEQ ID NO: 99521 - protein, 29 aa, Artificial Sequence
  Cyclic GFR-binding peptide
RIKPHQGQHRYKKLVVNKNEDFYLISIAN

SEQ ID NO: 99522 - protein, 29 aa, Artificial Sequence
  Cyclic GFR-binding peptide
RIKPHQGQHPIKGYVVNKNEDFYLINIPS

SEQ ID NO: 99523 - protein, 29 aa, Artificial Sequence
  Cyclic GFR-binding peptide
RIKPHQGQHPIKGYIKPTKGIFYLINIPS

SEQ ID NO: 99524 - protein, 29 aa, Artificial Sequence
  Cyclic GFR-binding peptide
RIKPHQGQHRHKRLYTVVGKDYYLISTAS

SEQ ID NO: 99525 - protein, 29 aa, Artificial Sequence
  Cyclic GFR-binding peptide
RIKPHQGQHEYKFKVVNNASDLYLISIPE

SEQ ID NO: 99526 - protein, 29 aa, Artificial Sequence
  Cyclic GFR-binding peptide
RIKPHQGQHRHKRLIIQQKDNYYLMSTAS

SEQ ID NO: 99527 - protein, 29 aa, Artificial Sequence
  Cyclic GFR-binding peptide
RIKPHQGQHEYKFKIIQQKDNLYLMSIPE

SEQ ID NO: 99528 - protein, 29 aa, Artificial Sequence
  Cyclic GFR-binding peptide
RIKPHQGQHPIKGYVKPKRGVFYLINIPS

SEQ ID NO: 99529 - protein, 29 aa, Artificial Sequence
  Cyclic GFR-binding peptide
RIKPHQGQHRHKRLVVNNASDYYLISTAS

SEQ ID NO: 99530 - protein, 29 aa, Artificial Sequence
  Cyclic GFR-binding peptide
RIKPHQGQHYHYKLVVNNASDKYLISIPS

SEQ ID NO: 99531 - protein, 29 aa, Artificial Sequence
  Cyclic GFR-binding peptide
RIKPHQGQHYHYKLIIQQKDNKYLMSIPS

SEQ ID NO: 99532 - protein, 29 aa, Artificial Sequence
  Cyclic GFR-binding peptide
RIKPHQGQHRHKRLVVNNAADYYLISTAS

SEQ ID NO: 99533 - protein, 29 aa, Artificial Sequence
  Cyclic GFR-binding peptide
EPISILYLDENKNVVKFKYERIKPHQGQH

SEQ ID NO: 99534 - protein, 29 aa, Artificial Sequence
  Cyclic GFR-binding peptide
SPINILYFVGRTPKVYGKIPRIKPHQGQH

SEQ ID NO: 99535 - protein, 29 aa, Artificial Sequence
  Cyclic GFR-binding peptide
EPISMLYLDNGRVLLKFKYERIKPHQGQH

SEQ ID NO: 99536 - protein, 29 aa, Artificial Sequence
  Cyclic GFR-binding peptide
SPISILYKDENKNVVLKYHYRIKPHQGQH

SEQ ID NO: 99537 - protein, 29 aa, Artificial Sequence
  Cyclic GFR-binding peptide
SATSMLYYDNGRVLLLRKHRRIKPHQGQH

SEQ ID NO: 99538 - protein, 29 aa, Artificial Sequence
  Cyclic GFR-binding peptide
SPISMLYKDNGRVLLLKYHYRIKPHQGQH

SEQ ID NO: 99539 - protein, 29 aa, Artificial Sequence
  Cyclic GFR-binding peptide
SATSILYYDENKNVVLRKHRRIKPHQGQH

SEQ ID NO: 99540 - protein, 29 aa, Artificial Sequence
  Cyclic GFR-binding peptide
NAISILYFDENKNVVLKKYRRIKPHQGQH

SEQ ID NO: 99541 - protein, 29 aa, Artificial Sequence
  Cyclic GFR-binding peptide
SPINILYFDENKNVVYGKIPRIKPHQGQH

SEQ ID NO: 99542 - protein, 29 aa, Artificial Sequence
  Cyclic GFR-binding peptide
SPINILYFIGKTPKIYGKIPRIKPHQGQH

SEQ ID NO: 99543 - protein, 29 aa, Artificial Sequence
  Cyclic GFR-binding peptide
SATSILYYDKGVVTYLRKHRRIKPHQGQH

SEQ ID NO: 99544 - protein, 29 aa, Artificial Sequence
  Cyclic GFR-binding peptide
EPISILYLDSANNVVKFKYERIKPHQGQH

SEQ ID NO: 99545 - protein, 29 aa, Artificial Sequence
  Cyclic GFR-binding peptide
SATSMLYYNDKQQIILRKHRRIKPHQGQH

SEQ ID NO: 99546 - protein, 29 aa, Artificial Sequence
  Cyclic GFR-binding peptide
EPISMLYLNDKQQIIKFKYERIKPHQGQH

SEQ ID NO: 99547 - protein, 29 aa, Artificial Sequence
  Cyclic GFR-binding peptide
SPINILYFVGRKPKVYGKIPRIKPHQGQH

SEQ ID NO: 99548 - protein, 29 aa, Artificial Sequence
  Cyclic GFR-binding peptide
SATSILYYDSANNVVLRKHRRIKPHQGQH

SEQ ID NO: 99549 - protein, 29 aa, Artificial Sequence
  Cyclic GFR-binding peptide
SPISILYKDSANNVVLKYHYRIKPHQGQH

SEQ ID NO: 99550 - protein, 29 aa, Artificial Sequence
  Cyclic GFR-binding peptide
SPISMLYKNDKQQIILKYHYRIKPHQGQH

SEQ ID NO: 99551 - protein, 29 aa, Artificial Sequence
  Cyclic GFR-binding peptide
SATSILYYDAANNVVLRKHRRIKPHQGQH

SEQ ID NO: 99552 - protein, 29 aa, Artificial Sequence
  Cyclic GFR-binding peptide
RIKPHQGQHSMEGIIIQQKDNMIQMTINS

SEQ ID NO: 99553 - protein, 29 aa, Artificial Sequence
  Cyclic GFR-binding peptide
RIKPHQGQHSMEGLVKPKRGVMIQITINS

SEQ ID NO: 99554 - protein, 29 aa, Artificial Sequence
  Cyclic GFR-binding peptide
RIKPHQGQHSMEGLVVNNASDMIQITINS

SEQ ID NO: 99555 - protein, 29 aa, Artificial Sequence
  Cyclic GFR-binding peptide
RIKPHQGQHSMEGILLVRGNDMIQMTINS

SEQ ID NO: 99556 - protein, 29 aa, Artificial Sequence
  Cyclic GFR-binding peptide
RIKPHQGQHSMEGLIKPTKGIMIQITINS

SEQ ID NO: 99557 - protein, 29 aa, Artificial Sequence
  Cyclic GFR-binding peptide
RIKPHQGQHSMEGLIVNSSDDMIQVTINS

SEQ ID NO: 99558 - protein, 29 aa, Artificial Sequence
  Cyclic GFR-binding peptide
RIKPHQGQHSMEGIVVNNASDMIQITINS

SEQ ID NO: 99559 - protein, 29 aa, Artificial Sequence
  Cyclic GFR-binding peptide
RIKPHQGQHSMEGLVVNNAADMIQITINS

SEQ ID NO: 99560 - protein, 29 aa, Artificial Sequence
  Cyclic GFR-binding peptide
RIKPHQGQHSMEGLLLVRGNDMIQMTINS

SEQ ID NO: 99561 - protein, 29 aa, Artificial Sequence
  Cyclic GFR-binding peptide
RIKPHQGQHSMEGLIIQQKDNMIQMTINS

SEQ ID NO: 99562 - protein, 29 aa, Artificial Sequence
  Cyclic GFR-binding peptide
RIKPHQGQHSMEGIVVNNAADMIQITINS

SEQ ID NO: 99563 - protein, 29 aa, Artificial Sequence
  Cyclic GFR-binding peptide
RIKPHQGQHSMEGLVKPTRGVMIQITINS

SEQ ID NO: 99564 - protein, 29 aa, Artificial Sequence
  Cyclic GFR-binding peptide
SNITMQIMNDKQQIIIGEMSRIKPHQGQH

SEQ ID NO: 99565 - protein, 29 aa, Artificial Sequence
  Cyclic GFR-binding peptide
SNITIQIMVGRKPKVLGEMSRIKPHQGQH

SEQ ID NO: 99566 - protein, 29 aa, Artificial Sequence
  Cyclic GFR-binding peptide
SNITIQIMDSANNVVLGEMSRIKPHQGQH

SEQ ID NO: 99567 - protein, 29 aa, Artificial Sequence
  Cyclic GFR-binding peptide
SNITMQIMDNGRVLLIGEMSRIKPHQGQH

SEQ ID NO: 99568 - protein, 29 aa, Artificial Sequence
  Cyclic GFR-binding peptide
SNITIQIMIGKTPKILGEMSRIKPHQGQH

SEQ ID NO: 99569 - protein, 29 aa, Artificial Sequence
  Cyclic GFR-binding peptide
SNITVQIMDDSSNVILGEMSRIKPHQGQH

SEQ ID NO: 99570 - protein, 29 aa, Artificial Sequence
  Cyclic GFR-binding peptide
SNITIQIMDSANNVVIGEMSRIKPHQGQH

SEQ ID NO: 99571 - protein, 29 aa, Artificial Sequence
  Cyclic GFR-binding peptide
SNITIQIMDAANNVVLGEMSRIKPHQGQH

SEQ ID NO: 99572 - protein, 29 aa, Artificial Sequence
  Cyclic GFR-binding peptide
SNITMQIMDNGRVLLLGEMSRIKPHQGQH

SEQ ID NO: 99573 - protein, 29 aa, Artificial Sequence
  Cyclic GFR-binding peptide
SNITMQIMNDKQQIILGEMSRIKPHQGQH

SEQ ID NO: 99574 - protein, 29 aa, Artificial Sequence
  Cyclic GFR-binding peptide
SNITIQIMDAANNVVIGEMSRIKPHQGQH

SEQ ID NO: 99575 - protein, 29 aa, Artificial Sequence
  Cyclic GFR-binding peptide
SNITIQIMVGRTPKVLGEMSRIKPHQGQH

SEQ ID NO: 99576 - protein, 29 aa, Artificial Sequence
  Cyclic GFR-binding peptide
RIKPHQGQHQYNKLVVNKNEDLYLISIAS

SEQ ID NO: 99577 - protein, 29 aa, Artificial Sequence
  Cyclic GFR-binding peptide
RIKPHQGQHQYNKLVVNNAADLYLISIAS

SEQ ID NO: 99578 - protein, 29 aa, Artificial Sequence
  Cyclic GFR-binding peptide
RIKPHQGQHQYNKLIIQQKDNLYLMSIAS

SEQ ID NO: 99579 - protein, 29 aa, Artificial Sequence
  Cyclic GFR-binding peptide
RIKPHQGQHQYNKLLLVRGNDLYLMSIAS

SEQ ID NO: 99580 - protein, 29 aa, Artificial Sequence
  Cyclic GFR-binding peptide
RIKPHQGQHQYNKLYTVVGKDLYLISIAS

SEQ ID NO: 99581 - protein, 29 aa, Artificial Sequence
  Cyclic GFR-binding peptide
SAISILYLDENKNVVLKNYQRIKPHQGQH

SEQ ID NO: 99582 - protein, 29 aa, Artificial Sequence
  Cyclic GFR-binding peptide
SAISILYLDAANNVVLKNYQRIKPHQGQH

SEQ ID NO: 99583 - protein, 29 aa, Artificial Sequence
  Cyclic GFR-binding peptide
SAISMLYLNDKQQIILKNYQRIKPHQGQH

SEQ ID NO: 99584 - protein, 29 aa, Artificial Sequence
  Cyclic GFR-binding peptide
SAISMLYLDNGRVLLLKNYQRIKPHQGQH

SEQ ID NO: 99585 - protein, 29 aa, Artificial Sequence
  Cyclic GFR-binding peptide
SAISILYLDKGVVTYLKNYQRIKPHQGQH

SEQ ID NO: 99586 - protein, 29 aa, Artificial Sequence
  Cyclic GFR-binding peptide
EYVRKKPKLRYKKLIKPTKGIFYLISIAN

SEQ ID NO: 99587 - protein, 31 aa, Artificial Sequence
  Cyclic GFR-binding peptide
EYVRKKPKLRHKRLFIPKKRVIEYYLVSTAS

SEQ ID NO: 99588 - protein, 29 aa, Artificial Sequence
  Cyclic GFR-binding peptide
EYVRKKPKLYHYKLVVKDYEDKYLMSIPS

SEQ ID NO: 99589 - protein, 29 aa, Artificial Sequence
  Cyclic GFR-binding peptide
EYVRKKPKLQYNKLIVNNSSDLYLVSIAS

SEQ ID NO: 99590 - protein, 29 aa, Artificial Sequence
  Cyclic GFR-binding peptide
EYVRKKPKLRYKKLVVKDYEDFYLMSIAN

SEQ ID NO: 99591 - protein, 29 aa, Artificial Sequence
  Cyclic GFR-binding peptide
EYVRKKPKLRYKKLVKPTRGVFYLISIAN

SEQ ID NO: 99592 - protein, 29 aa, Artificial Sequence
  Cyclic GFR-binding peptide
EYVRKKPKLRHKRLVVKENEDYYLMSTAS

SEQ ID NO: 99593 - protein, 29 aa, Artificial Sequence
  Cyclic GFR-binding peptide
EYVRKKPKLYHYKLIKPTKGIKYLISIPS

SEQ ID NO: 99594 - protein, 31 aa, Artificial Sequence
  Cyclic GFR-binding peptide
EYVRKKPKLRYKKLFIPKKRVIEFYLVSIAN

SEQ ID NO: 99595 - protein, 29 aa, Artificial Sequence
  Cyclic GFR-binding peptide
EYVRKKPKLYHYKLVVKENEDKYLMSIPS

SEQ ID NO: 99596 - protein, 29 aa, Artificial Sequence
  Cyclic GFR-binding peptide
EYVRKKPKLRHKRLVKPKRGVYYLISTAS

SEQ ID NO: 99597 - protein, 29 aa, Artificial Sequence
  Cyclic GFR-binding peptide
EYVRKKPKLYHYKLVKPKRGVKYLISIPS

SEQ ID NO: 99598 - protein, 31 aa, Artificial Sequence
  Cyclic GFR-binding peptide
EYVRKKPKLQYNKLFIPKKRVIELYLVSIAS

SEQ ID NO: 99599 - protein, 29 aa, Artificial Sequence
  Cyclic GFR-binding peptide
EYVRKKPKLQYNKLVKPTRGVLYLISIAS

SEQ ID NO: 99600 - protein, 29 aa, Artificial Sequence
  Cyclic GFR-binding peptide
EYVRKKPKLRYKKLVVKENEDFYLMSIAN

SEQ ID NO: 99601 - protein, 29 aa, Artificial Sequence
  Cyclic GFR-binding peptide
EYVRKKPKLQYNKLTPVGMDDLYLVSIAS

SEQ ID NO: 99602 - protein, 29 aa, Artificial Sequence
  Cyclic GFR-binding peptide
EYVRKKPKLRYKKLTPVGMDDFYLVSIAN

SEQ ID NO: 99603 - protein, 29 aa, Artificial Sequence
  Cyclic GFR-binding peptide
EYVRKKPKLRYKKLVKPKRGVFYLISIAN

SEQ ID NO: 99604 - protein, 29 aa, Artificial Sequence
  Cyclic GFR-binding peptide
EYVRKKPKLQYNKLVVKENEDLYLMSIAS

SEQ ID NO: 99605 - protein, 29 aa, Artificial Sequence
  Cyclic GFR-binding peptide
EYVRKKPKLYHYKLIVNSSDDKYLVSIPS

SEQ ID NO: 99606 - protein, 29 aa, Artificial Sequence
  Cyclic GFR-binding peptide
EYVRKKPKLQYNKLVKPKRGVLYLISIAS

SEQ ID NO: 99607 - protein, 29 aa, Artificial Sequence
  Cyclic GFR-binding peptide
EYVRKKPKLRYKKLIVNNSSDFYLVSIAN

SEQ ID NO: 99608 - protein, 29 aa, Artificial Sequence
  Cyclic GFR-binding peptide
EYVRKKPKLRYKKLIVNSSDDFYLVSIAN

SEQ ID NO: 99609 - protein, 29 aa, Artificial Sequence
  Cyclic GFR-binding peptide
EYVRKKPKLRHKRLVKPTRGVYYLISTAS

SEQ ID NO: 99610 - protein, 31 aa, Artificial Sequence
  Cyclic GFR-binding peptide
EYVRKKPKLYHYKLFIPKKRVIEKYLVSIPS

SEQ ID NO: 99611 - protein, 29 aa, Artificial Sequence
  Cyclic GFR-binding peptide
EYVRKKPKLRHKRLIKPTKGIYYLISTAS

SEQ ID NO: 99612 - protein, 29 aa, Artificial Sequence
  Cyclic GFR-binding peptide
EYVRKKPKLRHKRLTPVGMDDYYLVSTAS

SEQ ID NO: 99613 - protein, 29 aa, Artificial Sequence
  Cyclic GFR-binding peptide
EYVRKKPKLYHYKLTPVGMDDKYLVSIPS

SEQ ID NO: 99614 - protein, 29 aa, Artificial Sequence
  Cyclic GFR-binding peptide
EYVRKKPKLYHYKLIVNNSSDKYLVSIPS

SEQ ID NO: 99615 - protein, 29 aa, Artificial Sequence
  Cyclic GFR-binding peptide
EYVRKKPKLRHKRLIVNNSSDYYLVSTAS

SEQ ID NO: 99616 - protein, 29 aa, Artificial Sequence
  Cyclic GFR-binding peptide
EYVRKKPKLYHYKLVKPTRGVKYLISIPS

SEQ ID NO: 99617 - protein, 29 aa, Artificial Sequence
  Cyclic GFR-binding peptide
EYVRKKPKLRHKRLIVNSSDDYYLVSTAS

SEQ ID NO: 99618 - protein, 29 aa, Artificial Sequence
  Cyclic GFR-binding peptide
EYVRKKPKLRHKRLVVKDYEDYYLMSTAS

SEQ ID NO: 99619 - protein, 29 aa, Artificial Sequence
  Cyclic GFR-binding peptide
EYVRKKPKLQYNKLIKPTKGILYLISIAS

SEQ ID NO: 99620 - protein, 29 aa, Artificial Sequence
  Cyclic GFR-binding peptide
EYVRKKPKLQYNKLVVKDYEDLYLMSIAS

SEQ ID NO: 99621 - protein, 29 aa, Artificial Sequence
  Cyclic GFR-binding peptide
EYVRKKPKLQYNKLIVNSSDDLYLVSIAS

SEQ ID NO: 99622 - protein, 29 aa, Artificial Sequence
  Cyclic GFR-binding peptide
NAISILYFIGKTPKILKKYREYVRKKPKL

SEQ ID NO: 99623 - protein, 31 aa, Artificial Sequence
  Cyclic GFR-binding peptide
SATSVLYYEIVRKKPIFLRKHREYVRKKPKL

SEQ ID NO: 99624 - protein, 29 aa, Artificial Sequence
  Cyclic GFR-binding peptide
SPISMLYKDEYDKVVLKYHYEYVRKKPKL

SEQ ID NO: 99625 - protein, 29 aa, Artificial Sequence
  Cyclic GFR-binding peptide
SAISVLYLDSSNNVILKNYQEYVRKKPKL

SEQ ID NO: 99626 - protein, 29 aa, Artificial Sequence
  Cyclic GFR-binding peptide
NAISMLYFDEYDKVVLKKYREYVRKKPKL

SEQ ID NO: 99627 - protein, 29 aa, Artificial Sequence
  Cyclic GFR-binding peptide
NAISILYFVGRTPKVLKKYREYVRKKPKL

SEQ ID NO: 99628 - protein, 29 aa, Artificial Sequence
  Cyclic GFR-binding peptide
SATSMLYYDENEKVVLRKHREYVRKKPKL

SEQ ID NO: 99629 - protein, 29 aa, Artificial Sequence
  Cyclic GFR-binding peptide
SPISILYKIGKTPKILKYHYEYVRKKPKL

SEQ ID NO: 99630 - protein, 31 aa, Artificial Sequence
  Cyclic GFR-binding peptide
NAISVLYFEIVRKKPIFLKKYREYVRKKPKL

SEQ ID NO: 99631 - protein, 29 aa, Artificial Sequence
  Cyclic GFR-binding peptide
SPISMLYKDENEKVVLKYHYEYVRKKPKL

SEQ ID NO: 99632 - protein, 29 aa, Artificial Sequence
  Cyclic GFR-binding peptide
SATSILYYVGRKPKVLRKHREYVRKKPKL

SEQ ID NO: 99633 - protein, 29 aa, Artificial Sequence
  Cyclic GFR-binding peptide
SPISILYKVGRKPKVLKYHYEYVRKKPKL

SEQ ID NO: 99634 - protein, 31 aa, Artificial Sequence
  Cyclic GFR-binding peptide
SAISVLYLEIVRKKPIFLKNYQEYVRKKPKL

SEQ ID NO: 99635 - protein, 29 aa, Artificial Sequence
  Cyclic GFR-binding peptide
SAISILYLVGRTPKVLKNYQEYVRKKPKL

SEQ ID NO: 99636 - protein, 29 aa, Artificial Sequence
  Cyclic GFR-binding peptide
NAISMLYFDENEKVVLKKYREYVRKKPKL

SEQ ID NO: 99637 - protein, 29 aa, Artificial Sequence
  Cyclic GFR-binding peptide
SAISVLYLDDMGVPTLKNYQEYVRKKPKL

SEQ ID NO: 99638 - protein, 29 aa, Artificial Sequence
  Cyclic GFR-binding peptide
NAISVLYFDDMGVPTLKKYREYVRKKPKL

SEQ ID NO: 99639 - protein, 29 aa, Artificial Sequence
  Cyclic GFR-binding peptide
NAISILYFVGRKPKVLKKYREYVRKKPKL

SEQ ID NO: 99640 - protein, 29 aa, Artificial Sequence
  Cyclic GFR-binding peptide
SAISMLYLDENEKVVLKNYQEYVRKKPKL

SEQ ID NO: 99641 - protein, 29 aa, Artificial Sequence
  Cyclic GFR-binding peptide
SPISVLYKDDSSNVILKYHYEYVRKKPKL

SEQ ID NO: 99642 - protein, 29 aa, Artificial Sequence
  Cyclic GFR-binding peptide
SAISILYLVGRKPKVLKNYQEYVRKKPKL

SEQ ID NO: 99643 - protein, 29 aa, Artificial Sequence
  Cyclic GFR-binding peptide
NAISVLYFDSSNNVILKKYREYVRKKPKL

SEQ ID NO: 99644 - protein, 29 aa, Artificial Sequence
  Cyclic GFR-binding peptide
NAISVLYFDDSSNVILKKYREYVRKKPKL

SEQ ID NO: 99645 - protein, 29 aa, Artificial Sequence
  Cyclic GFR-binding peptide
SATSILYYVGRTPKVLRKHREYVRKKPKL

SEQ ID NO: 99646 - protein, 31 aa, Artificial Sequence
  Cyclic GFR-binding peptide
SPISVLYKEIVRKKPIFLKYHYEYVRKKPKL

SEQ ID NO: 99647 - protein, 29 aa, Artificial Sequence
  Cyclic GFR-binding peptide
SATSILYYIGKTPKILRKHREYVRKKPKL

SEQ ID NO: 99648 - protein, 29 aa, Artificial Sequence
  Cyclic GFR-binding peptide
SATSVLYYDDMGVPTLRKHREYVRKKPKL

SEQ ID NO: 99649 - protein, 29 aa, Artificial Sequence
  Cyclic GFR-binding peptide
SPISVLYKDDMGVPTLKYHYEYVRKKPKL

SEQ ID NO: 99650 - protein, 29 aa, Artificial Sequence
  Cyclic GFR-binding peptide
SPISVLYKDSSNNVILKYHYEYVRKKPKL

SEQ ID NO: 99651 - protein, 29 aa, Artificial Sequence
  Cyclic GFR-binding peptide
SATSVLYYDSSNNVILRKHREYVRKKPKL

SEQ ID NO: 99652 - protein, 29 aa, Artificial Sequence
  Cyclic GFR-binding peptide
SPISILYKVGRTPKVLKYHYEYVRKKPKL

SEQ ID NO: 99653 - protein, 29 aa, Artificial Sequence
  Cyclic GFR-binding peptide
SATSVLYYDDSSNVILRKHREYVRKKPKL

SEQ ID NO: 99654 - protein, 29 aa, Artificial Sequence
  Cyclic GFR-binding peptide
SATSMLYYDEYDKVVLRKHREYVRKKPKL

SEQ ID NO: 99655 - protein, 29 aa, Artificial Sequence
  Cyclic GFR-binding peptide
SAISILYLIGKTPKILKNYQEYVRKKPKL

SEQ ID NO: 99656 - protein, 29 aa, Artificial Sequence
  Cyclic GFR-binding peptide
SAISMLYLDEYDKVVLKNYQEYVRKKPKL

SEQ ID NO: 99657 - protein, 29 aa, Artificial Sequence
  Cyclic GFR-binding peptide
SAISVLYLDDSSNVILKNYQEYVRKKPKL

SEQ ID NO: 99658 - protein, 29 aa, Artificial Sequence
  Cyclic GFR-binding peptide
EYVRKKPKLNSLQEVVKDYEDYYLMTLPE

SEQ ID NO: 99659 - protein, 29 aa, Artificial Sequence
  Cyclic GFR-binding peptide
EYVRKKPKLNSLQEIKPTKGIYYVIPLPE

SEQ ID NO: 99660 - protein, 29 aa, Artificial Sequence
  Cyclic GFR-binding peptide
EYVRKKPKLNSLQEVKPKRGVYYLITLPE

SEQ ID NO: 99661 - protein, 29 aa, Artificial Sequence
  Cyclic GFR-binding peptide
EYVRKKPKLNSLQEVKPTRGVYYVIPLPE

SEQ ID NO: 99662 - protein, 29 aa, Artificial Sequence
  Cyclic GFR-binding peptide
EYVRKKPKLEYQKYIVNSSDDIFLVSIPS

SEQ ID NO: 99663 - protein, 29 aa, Artificial Sequence
  Cyclic GFR-binding peptide
EYVRKKPKLEYQKYVKPTRGVIFLISIPS

SEQ ID NO: 99664 - protein, 29 aa, Artificial Sequence
  Cyclic GFR-binding peptide
EYVRKKPKLNSLQEVVKENEDYYLMTLPE

SEQ ID NO: 99665 - protein, 29 aa, Artificial Sequence
  Cyclic GFR-binding peptide
EYVRKKPKLNSLQEVVNNASDYYLITLPE

SEQ ID NO: 99666 - protein, 29 aa, Artificial Sequence
  Cyclic GFR-binding peptide
EYVRKKPKLNSLQEVKPKRGVYYVIPLPE

SEQ ID NO: 99667 - protein, 29 aa, Artificial Sequence
  Cyclic GFR-binding peptide
EYVRKKPKLNSLQEVVNNASDYYVIPLPE

SEQ ID NO: 99668 - protein, 29 aa, Artificial Sequence
  Cyclic GFR-binding peptide
EYVRKKPKLNSLQEVKPTRGVYYLITLPE

SEQ ID NO: 99669 - protein, 29 aa, Artificial Sequence
  Cyclic GFR-binding peptide
EYVRKKPKLEYQKYIKPTKGIIFLISIPS

SEQ ID NO: 99670 - protein, 29 aa, Artificial Sequence
  Cyclic GFR-binding peptide
EYVRKKPKLEYQKYVVNNASDIFLISIPS

SEQ ID NO: 99671 - protein, 29 aa, Artificial Sequence
  Cyclic GFR-binding peptide
EYVRKKPKLNSLQEIVNSSDDYYVVPLPE

SEQ ID NO: 99672 - protein, 29 aa, Artificial Sequence
  Cyclic GFR-binding peptide
EYVRKKPKLNSLQEVVKDYEDYYVMPLPE

SEQ ID NO: 99673 - protein, 29 aa, Artificial Sequence
  Cyclic GFR-binding peptide
EYVRKKPKLEYQKYVVKENEDIFLMSIPS

SEQ ID NO: 99674 - protein, 29 aa, Artificial Sequence
  Cyclic GFR-binding peptide
EYVRKKPKLNSLQEVVKENEDYYVMPLPE

SEQ ID NO: 99675 - protein, 29 aa, Artificial Sequence
  Cyclic GFR-binding peptide
EYVRKKPKLEYQKYVVKDYEDIFLMSIPS

SEQ ID NO: 99676 - protein, 29 aa, Artificial Sequence
  Cyclic GFR-binding peptide
EYVRKKPKLQYNKLVVNNASDLYLISIAS

SEQ ID NO: 99677 - protein, 29 aa, Artificial Sequence
  Cyclic GFR-binding peptide
EYVRKKPKLNSLQEIKPTKGIYYLITLPE

SEQ ID NO: 99678 - protein, 29 aa, Artificial Sequence
  Cyclic GFR-binding peptide
EYVRKKPKLEYQKYVKPKRGVIFLISIPS

SEQ ID NO: 99679 - protein, 29 aa, Artificial Sequence
  Cyclic GFR-binding peptide
EYVRKKPKLRYKKLVVNNASDFYLISIAN

SEQ ID NO: 99680 - protein, 29 aa, Artificial Sequence
  Cyclic GFR-binding peptide
EYVRKKPKLNSLQEIVNSSDDYYLVTLPE

SEQ ID NO: 99681 - protein, 29 aa, Artificial Sequence
  Cyclic GFR-binding peptide
EPLTMLYYDEYDKVVEQLSNEYVRKKPKL

SEQ ID NO: 99682 - protein, 29 aa, Artificial Sequence
  Cyclic GFR-binding peptide
EPLPIVYYIGKTPKIEQLSNEYVRKKPKL

SEQ ID NO: 99683 - protein, 29 aa, Artificial Sequence
  Cyclic GFR-binding peptide
EPLTILYYVGRKPKVEQLSNEYVRKKPKL

SEQ ID NO: 99684 - protein, 29 aa, Artificial Sequence
  Cyclic GFR-binding peptide
EPLPIVYYVGRTPKVEQLSNEYVRKKPKL

SEQ ID NO: 99685 - protein, 29 aa, Artificial Sequence
  Cyclic GFR-binding peptide
SPISVLFIDDSSNVIYKQYEEYVRKKPKL

SEQ ID NO: 99686 - protein, 29 aa, Artificial Sequence
  Cyclic GFR-binding peptide
SPISILFIVGRTPKVYKQYEEYVRKKPKL

SEQ ID NO: 99687 - protein, 29 aa, Artificial Sequence
  Cyclic GFR-binding peptide
EPLTMLYYDENEKVVEQLSNEYVRKKPKL

SEQ ID NO: 99688 - protein, 29 aa, Artificial Sequence
  Cyclic GFR-binding peptide
EPLTILYYDSANNVVEQLSNEYVRKKPKL

SEQ ID NO: 99689 - protein, 29 aa, Artificial Sequence
  Cyclic GFR-binding peptide
EPLPIVYYVGRKPKVEQLSNEYVRKKPKL

SEQ ID NO: 99690 - protein, 29 aa, Artificial Sequence
  Cyclic GFR-binding peptide
EPLPIVYYDSANNVVEQLSNEYVRKKPKL

SEQ ID NO: 99691 - protein, 29 aa, Artificial Sequence
  Cyclic GFR-binding peptide
EPLTILYYVGRTPKVEQLSNEYVRKKPKL

SEQ ID NO: 99692 - protein, 29 aa, Artificial Sequence
  Cyclic GFR-binding peptide
SPISILFIIGKTPKIYKQYEEYVRKKPKL

SEQ ID NO: 99693 - protein, 29 aa, Artificial Sequence
  Cyclic GFR-binding peptide
SPISILFIDSANNVVYKQYEEYVRKKPKL

SEQ ID NO: 99694 - protein, 29 aa, Artificial Sequence
  Cyclic GFR-binding peptide
EPLPVVYYDDSSNVIEQLSNEYVRKKPKL

SEQ ID NO: 99695 - protein, 29 aa, Artificial Sequence
  Cyclic GFR-binding peptide
EPLPMVYYDEYDKVVEQLSNEYVRKKPKL

SEQ ID NO: 99696 - protein, 29 aa, Artificial Sequence
  Cyclic GFR-binding peptide
SPISMLFIDENEKVVYKQYEEYVRKKPKL

SEQ ID NO: 99697 - protein, 29 aa, Artificial Sequence
  Cyclic GFR-binding peptide
EPLPMVYYDENEKVVEQLSNEYVRKKPKL

SEQ ID NO: 99698 - protein, 29 aa, Artificial Sequence
  Cyclic GFR-binding peptide
SPISMLFIDEYDKVVYKQYEEYVRKKPKL

SEQ ID NO: 99699 - protein, 29 aa, Artificial Sequence
  Cyclic GFR-binding peptide
SAISILYLDSANNVVLKNYQEYVRKKPKL

SEQ ID NO: 99700 - protein, 29 aa, Artificial Sequence
  Cyclic GFR-binding peptide
EPLTILYYIGKTPKIEQLSNEYVRKKPKL

SEQ ID NO: 99701 - protein, 29 aa, Artificial Sequence
  Cyclic GFR-binding peptide
SPISILFIVGRKPKVYKQYEEYVRKKPKL

SEQ ID NO: 99702 - protein, 29 aa, Artificial Sequence
  Cyclic GFR-binding peptide
NAISILYFDSANNVVLKKYREYVRKKPKL

SEQ ID NO: 99703 - protein, 29 aa, Artificial Sequence
  Cyclic GFR-binding peptide
EPLTVLYYDDSSNVIEQLSNEYVRKKPKL

SEQ ID NO: 99704 - protein, 31 aa, Artificial Sequence
  Cyclic GFR-binding peptide
EYVRKKPKLVTAKKLKPKKRVYEIKRVQVPR

SEQ ID NO: 99705 - protein, 31 aa, Artificial Sequence
  Cyclic GFR-binding peptide
EYVRKKPKLVQVEKLKPKKRVYEVKAVKVSR

SEQ ID NO: 99706 - protein, 31 aa, Artificial Sequence
  Cyclic GFR-binding peptide
EYVRKKPKLVQVEKFIPKKRVIEVKAVKVSR

SEQ ID NO: 99707 - protein, 31 aa, Artificial Sequence
  Cyclic GFR-binding peptide
EYVRKKPKLVQVEKHQGQHPKIRVKAMKVSR

SEQ ID NO: 99708 - protein, 31 aa, Artificial Sequence
  Cyclic GFR-binding peptide
EYVRKKPKLVTAKKHQGQHPKIRIKRMQVPR

SEQ ID NO: 99709 - protein, 31 aa, Artificial Sequence
  Cyclic GFR-binding peptide
EYVRKKPKLSMEGLLKPKKRVYEMIQVTINS

SEQ ID NO: 99710 - protein, 31 aa, Artificial Sequence
  Cyclic GFR-binding peptide
EYVRKKPKLSMEGIFIPKKRVIEMIQVTINS

SEQ ID NO: 99711 - protein, 31 aa, Artificial Sequence
  Cyclic GFR-binding peptide
EYVRKKPKLSMEGLHQGQHPKIRMIQMTINS

SEQ ID NO: 99712 - protein, 31 aa, Artificial Sequence
  Cyclic GFR-binding peptide
EYVRKKPKLSMEGILKPKKRVYEMIQVTINS

SEQ ID NO: 99713 - protein, 31 aa, Artificial Sequence
  Cyclic GFR-binding peptide
EYVRKKPKLSMEGLFIPKKRVIEMIQVTINS

SEQ ID NO: 99714 - protein, 31 aa, Artificial Sequence
  Cyclic GFR-binding peptide
EYVRKKPKLVTAKKFIPKKRVIEIKRVQVPR

SEQ ID NO: 99715 - protein, 31 aa, Artificial Sequence
  Cyclic GFR-binding peptide
EYVRKKPKLSMEGIHQGQHPKIRMIQMTINS

SEQ ID NO: 99716 - protein, 31 aa, Artificial Sequence
  Cyclic GFR-binding peptide
RPVQVRKIEYVRKKPKLKKATVEYVRKKPKL

SEQ ID NO: 99717 - protein, 31 aa, Artificial Sequence
  Cyclic GFR-binding peptide
RSVKVAKVEYVRKKPKLKEVQVEYVRKKPKL

SEQ ID NO: 99718 - protein, 31 aa, Artificial Sequence
  Cyclic GFR-binding peptide
RSVKVAKVEIVRKKPIFKEVQVEYVRKKPKL

SEQ ID NO: 99719 - protein, 31 aa, Artificial Sequence
  Cyclic GFR-binding peptide
RSVKMAKVRIKPHQGQHKEVQVEYVRKKPKL

SEQ ID NO: 99720 - protein, 31 aa, Artificial Sequence
  Cyclic GFR-binding peptide
RPVQMRKIRIKPHQGQHKKATVEYVRKKPKL

SEQ ID NO: 99721 - protein, 31 aa, Artificial Sequence
  Cyclic GFR-binding peptide
SNITVQIMEYVRKKPKLLGEMSEYVRKKPKL

SEQ ID NO: 99722 - protein, 31 aa, Artificial Sequence
  Cyclic GFR-binding peptide
SNITVQIMEIVRKKPIFIGEMSEYVRKKPKL

SEQ ID NO: 99723 - protein, 31 aa, Artificial Sequence
  Cyclic GFR-binding peptide
SNITMQIMRIKPHQGQHLGEMSEYVRKKPKL

SEQ ID NO: 99724 - protein, 31 aa, Artificial Sequence
  Cyclic GFR-binding peptide
SNITVQIMEYVRKKPKLIGEMSEYVRKKPKL

SEQ ID NO: 99725 - protein, 31 aa, Artificial Sequence
  Cyclic GFR-binding peptide
SNITVQIMEIVRKKPIFLGEMSEYVRKKPKL

SEQ ID NO: 99726 - protein, 31 aa, Artificial Sequence
  Cyclic GFR-binding peptide
RPVQVRKIEIVRKKPIFKKATVEYVRKKPKL

SEQ ID NO: 99727 - protein, 31 aa, Artificial Sequence
  Cyclic GFR-binding peptide
SNITMQIMRIKPHQGQHIGEMSEYVRKKPKL

SEQ ID NO: 99728 - protein, 29 aa, Artificial Sequence
  Cyclic GFR-binding peptide
EYVRKKPKLEYKFKVKPTRGVLYLISIPE

SEQ ID NO: 99729 - protein, 29 aa, Artificial Sequence
  Cyclic GFR-binding peptide
EYVRKKPKLEYKFKTPVGMDDLYLVSIPE

SEQ ID NO: 99730 - protein, 29 aa, Artificial Sequence
  Cyclic GFR-binding peptide
EYVRKKPKLEYQKYVKPKRGVIYLISIPS

SEQ ID NO: 99731 - protein, 29 aa, Artificial Sequence
  Cyclic GFR-binding peptide
EYVRKKPKLEYQKYVVKDYEDIYLMSIPS

SEQ ID NO: 99732 - protein, 29 aa, Artificial Sequence
  Cyclic GFR-binding peptide
EYVRKKPKLEYKFKIKPTKGILYLISIPE

SEQ ID NO: 99733 - protein, 29 aa, Artificial Sequence
  Cyclic GFR-binding peptide
EYVRKKPKLYHYKLYTVVGKDKYLISIPS

SEQ ID NO: 99734 - protein, 29 aa, Artificial Sequence
  Cyclic GFR-binding peptide
EYVRKKPKLRYKKLYTVVGKDFYLISIAN

SEQ ID NO: 99735 - protein, 29 aa, Artificial Sequence
  Cyclic GFR-binding peptide
EYVRKKPKLEYQKYVVNNAADIYLISIPS

SEQ ID NO: 99736 - protein, 29 aa, Artificial Sequence
  Cyclic GFR-binding peptide
EYVRKKPKLEYQKYVKPTRGVIYLISIPS

SEQ ID NO: 99737 - protein, 29 aa, Artificial Sequence
  Cyclic GFR-binding peptide
EYVRKKPKLEYQKYTPVGMDDIYLVSIPS

SEQ ID NO: 99738 - protein, 29 aa, Artificial Sequence
  Cyclic GFR-binding peptide
EYVRKKPKLEYKFKVVKDYEDLYLMSIPE

SEQ ID NO: 99739 - protein, 29 aa, Artificial Sequence
  Cyclic GFR-binding peptide
EYVRKKPKLEYKFKVVNNAADLYLISIPE

SEQ ID NO: 99740 - protein, 29 aa, Artificial Sequence
  Cyclic GFR-binding peptide
EYVRKKPKLEYQKYVVKENEDIYLMSIPS

SEQ ID NO: 99741 - protein, 29 aa, Artificial Sequence
  Cyclic GFR-binding peptide
EYVRKKPKLEYQKYIKPTKGIIYLISIPS

SEQ ID NO: 99742 - protein, 29 aa, Artificial Sequence
  Cyclic GFR-binding peptide
EYVRKKPKLRYKKLVVNNAADFYLISIAN

SEQ ID NO: 99743 - protein, 29 aa, Artificial Sequence
  Cyclic GFR-binding peptide
EYVRKKPKLYHYKLVVNNAADKYLISIPS

SEQ ID NO: 99744 - protein, 29 aa, Artificial Sequence
  Cyclic GFR-binding peptide
EYVRKKPKLEYKFKIVNNSSDLYLVSIPE

SEQ ID NO: 99745 - protein, 29 aa, Artificial Sequence
  Cyclic GFR-binding peptide
EYVRKKPKLEYQKYIVNSSDDIYLVSIPS

SEQ ID NO: 99746 - protein, 29 aa, Artificial Sequence
  Cyclic GFR-binding peptide
EYVRKKPKLEYKFKIVNSSDDLYLVSIPE

SEQ ID NO: 99747 - protein, 29 aa, Artificial Sequence
  Cyclic GFR-binding peptide
EYVRKKPKLEYKFKVKPKRGVLYLISIPE

SEQ ID NO: 99748 - protein, 29 aa, Artificial Sequence
  Cyclic GFR-binding peptide
EYVRKKPKLEYQKYYTVVGKDIYLISIPS

SEQ ID NO: 99749 - protein, 29 aa, Artificial Sequence
  Cyclic GFR-binding peptide
EYVRKKPKLEYKFKVVKENEDLYLMSIPE

SEQ ID NO: 99750 - protein, 29 aa, Artificial Sequence
  Cyclic GFR-binding peptide
EYVRKKPKLEYQKYIVNNSSDIYLVSIPS

SEQ ID NO: 99751 - protein, 29 aa, Artificial Sequence
  Cyclic GFR-binding peptide
EYVRKKPKLEYKFKYTVVGKDLYLISIPE

SEQ ID NO: 99752 - protein, 29 aa, Artificial Sequence
  Cyclic GFR-binding peptide
EPISILYLVGRTPKVKFKYEEYVRKKPKL

SEQ ID NO: 99753 - protein, 29 aa, Artificial Sequence
  Cyclic GFR-binding peptide
EPISVLYLDDMGVPTKFKYEEYVRKKPKL

SEQ ID NO: 99754 - protein, 29 aa, Artificial Sequence
  Cyclic GFR-binding peptide
SPISILYIVGRKPKVYKQYEEYVRKKPKL

SEQ ID NO: 99755 - protein, 29 aa, Artificial Sequence
  Cyclic GFR-binding peptide
SPISMLYIDEYDKVVYKQYEEYVRKKPKL

SEQ ID NO: 99756 - protein, 29 aa, Artificial Sequence
  Cyclic GFR-binding peptide
EPISILYLIGKTPKIKFKYEEYVRKKPKL

SEQ ID NO: 99757 - protein, 29 aa, Artificial Sequence
  Cyclic GFR-binding peptide
SPISILYKDKGVVTYLKYHYEYVRKKPKL

SEQ ID NO: 99758 - protein, 29 aa, Artificial Sequence
  Cyclic GFR-binding peptide
NAISILYFDKGVVTYLKKYREYVRKKPKL

SEQ ID NO: 99759 - protein, 29 aa, Artificial Sequence
  Cyclic GFR-binding peptide
SPISILYIDAANNVVYKQYEEYVRKKPKL

SEQ ID NO: 99760 - protein, 29 aa, Artificial Sequence
  Cyclic GFR-binding peptide
SPISILYIVGRTPKVYKQYEEYVRKKPKL

SEQ ID NO: 99761 - protein, 29 aa, Artificial Sequence
  Cyclic GFR-binding peptide
SPISVLYIDDMGVPTYKQYEEYVRKKPKL

SEQ ID NO: 99762 - protein, 29 aa, Artificial Sequence
  Cyclic GFR-binding peptide
EPISMLYLDEYDKVVKFKYEEYVRKKPKL

SEQ ID NO: 99763 - protein, 29 aa, Artificial Sequence
  Cyclic GFR-binding peptide
EPISILYLDAANNVVKFKYEEYVRKKPKL

SEQ ID NO: 99764 - protein, 29 aa, Artificial Sequence
  Cyclic GFR-binding peptide
SPISMLYIDENEKVVYKQYEEYVRKKPKL

SEQ ID NO: 99765 - protein, 29 aa, Artificial Sequence
  Cyclic GFR-binding peptide
SPISILYIIGKTPKIYKQYEEYVRKKPKL

SEQ ID NO: 99766 - protein, 29 aa, Artificial Sequence
  Cyclic GFR-binding peptide
NAISILYFDAANNVVLKKYREYVRKKPKL

SEQ ID NO: 99767 - protein, 29 aa, Artificial Sequence
  Cyclic GFR-binding peptide
SPISILYKDAANNVVLKYHYEYVRKKPKL

SEQ ID NO: 99768 - protein, 29 aa, Artificial Sequence
  Cyclic GFR-binding peptide
EPISVLYLDSSNNVIKFKYEEYVRKKPKL

SEQ ID NO: 99769 - protein, 29 aa, Artificial Sequence
  Cyclic GFR-binding peptide
SPISVLYIDDSSNVIYKQYEEYVRKKPKL

SEQ ID NO: 99770 - protein, 29 aa, Artificial Sequence
  Cyclic GFR-binding peptide
EPISVLYLDDSSNVIKFKYEEYVRKKPKL

SEQ ID NO: 99771 - protein, 29 aa, Artificial Sequence
  Cyclic GFR-binding peptide
EPISILYLVGRKPKVKFKYEEYVRKKPKL

SEQ ID NO: 99772 - protein, 29 aa, Artificial Sequence
  Cyclic GFR-binding peptide
SPISILYIDKGVVTYYKQYEEYVRKKPKL

SEQ ID NO: 99773 - protein, 29 aa, Artificial Sequence
  Cyclic GFR-binding peptide
EPISMLYLDENEKVVKFKYEEYVRKKPKL

SEQ ID NO: 99774 - protein, 29 aa, Artificial Sequence
  Cyclic GFR-binding peptide
SPISVLYIDSSNNVIYKQYEEYVRKKPKL

SEQ ID NO: 99775 - protein, 29 aa, Artificial Sequence
  Cyclic GFR-binding peptide
EPISILYLDKGVVTYKFKYEEYVRKKPKL

SEQ ID NO: 99776 - protein, 29 aa, Artificial Sequence
  Cyclic GFR-binding peptide
EYVRKKPKLPIKGYIIQQKDNFYLMNIPS

SEQ ID NO: 99777 - protein, 29 aa, Artificial Sequence
  Cyclic GFR-binding peptide
EYVRKKPKLPIKGYVVKDYEDFYLMNIPS

SEQ ID NO: 99778 - protein, 29 aa, Artificial Sequence
  Cyclic GFR-binding peptide
EYVRKKPKLPIKGYIVNSSDDFYLVNIPS

SEQ ID NO: 99779 - protein, 29 aa, Artificial Sequence
  Cyclic GFR-binding peptide
EYVRKKPKLPIKGYVVNNAADFYLINIPS

SEQ ID NO: 99780 - protein, 29 aa, Artificial Sequence
  Cyclic GFR-binding peptide
EYVRKKPKLPIKGYYTVVGKDFYLINIPS

SEQ ID NO: 99781 - protein, 29 aa, Artificial Sequence
  Cyclic GFR-binding peptide
EYVRKKPKLPIKGYLLVRGNDFYLMNIPS

SEQ ID NO: 99782 - protein, 29 aa, Artificial Sequence
  Cyclic GFR-binding peptide
EYVRKKPKLPIKGYVVKENEDFYLMNIPS

SEQ ID NO: 99783 - protein, 29 aa, Artificial Sequence
  Cyclic GFR-binding peptide
EYVRKKPKLPIKGYVVNNASDFYLINIPS

SEQ ID NO: 99784 - protein, 29 aa, Artificial Sequence
  Cyclic GFR-binding peptide
EYVRKKPKLPIKGYTPVGMDDFYLVNIPS

SEQ ID NO: 99785 - protein, 29 aa, Artificial Sequence
  Cyclic GFR-binding peptide
EYVRKKPKLPIKGYIVNNSSDFYLVNIPS

SEQ ID NO: 99786 - protein, 29 aa, Artificial Sequence
  Cyclic GFR-binding peptide
SPINMLYFNDKQQIIYGKIPEYVRKKPKL

SEQ ID NO: 99787 - protein, 29 aa, Artificial Sequence
  Cyclic GFR-binding peptide
SPINMLYFDEYDKVVYGKIPEYVRKKPKL

SEQ ID NO: 99788 - protein, 29 aa, Artificial Sequence
  Cyclic GFR-binding peptide
SPINVLYFDDSSNVIYGKIPEYVRKKPKL

SEQ ID NO: 99789 - protein, 29 aa, Artificial Sequence
  Cyclic GFR-binding peptide
SPINILYFDAANNVVYGKIPEYVRKKPKL

SEQ ID NO: 99790 - protein, 29 aa, Artificial Sequence
  Cyclic GFR-binding peptide
SPINILYFDKGVVTYYGKIPEYVRKKPKL

SEQ ID NO: 99791 - protein, 29 aa, Artificial Sequence
  Cyclic GFR-binding peptide
SPINMLYFDNGRVLLYGKIPEYVRKKPKL

SEQ ID NO: 99792 - protein, 29 aa, Artificial Sequence
  Cyclic GFR-binding peptide
SPINMLYFDENEKVVYGKIPEYVRKKPKL

SEQ ID NO: 99793 - protein, 29 aa, Artificial Sequence
  Cyclic GFR-binding peptide
SPINILYFDSANNVVYGKIPEYVRKKPKL

SEQ ID NO: 99794 - protein, 29 aa, Artificial Sequence
  Cyclic GFR-binding peptide
SPINVLYFDDMGVPTYGKIPEYVRKKPKL

SEQ ID NO: 99795 - protein, 29 aa, Artificial Sequence
  Cyclic GFR-binding peptide
SPINVLYFDSSNNVIYGKIPEYVRKKPKL

SEQ ID NO: 99796 - protein, 29 aa, Artificial Sequence
  Cyclic GFR-binding peptide
EYVRKKPKLEYQKYVVNNASDIYLISIPS

SEQ ID NO: 99797 - protein, 29 aa, Artificial Sequence
  Cyclic GFR-binding peptide
EYVRKKPKLEYQKYIIQQKDNIYLMSIPS

SEQ ID NO: 99798 - protein, 29 aa, Artificial Sequence
  Cyclic GFR-binding peptide
EYVRKKPKLEYQKYLLVRGNDIYLMSIPS

SEQ ID NO: 99799 - protein, 29 aa, Artificial Sequence
  Cyclic GFR-binding peptide
SPISILYIDSANNVVYKQYEEYVRKKPKL

SEQ ID NO: 99800 - protein, 29 aa, Artificial Sequence
  Cyclic GFR-binding peptide
SPISMLYINDKQQIIYKQYEEYVRKKPKL

SEQ ID NO: 99801 - protein, 29 aa, Artificial Sequence
  Cyclic GFR-binding peptide
SPISMLYIDNGRVLLYKQYEEYVRKKPKL

SEQ ID NO: 99802 - protein, 29 aa, Artificial Sequence
  Cyclic GFR-binding peptide
EYVRKKPKLPYVKLYTVVGKDFFLISLSS

SEQ ID NO: 99803 - protein, 29 aa, Artificial Sequence
  Cyclic GFR-binding peptide
EYVRKKPKLPYVKLIKPTKGIFFLISLSS

SEQ ID NO: 99804 - protein, 29 aa, Artificial Sequence
  Cyclic GFR-binding peptide
EYVRKKPKLPYVKLIIQQKDNFFLMSLSS

SEQ ID NO: 99805 - protein, 29 aa, Artificial Sequence
  Cyclic GFR-binding peptide
EYVRKKPKLPYVKLIVNSSDDFFLVSLSS

SEQ ID NO: 99806 - protein, 29 aa, Artificial Sequence
  Cyclic GFR-binding peptide
EYVRKKPKLPYVKLVKPKRGVFFLISLSS

SEQ ID NO: 99807 - protein, 29 aa, Artificial Sequence
  Cyclic GFR-binding peptide
EYVRKKPKLPYVKLVKPTRGVFFLISLSS

SEQ ID NO: 99808 - protein, 29 aa, Artificial Sequence
  Cyclic GFR-binding peptide
EYVRKKPKLPYVKLTPVGMDDFFLVSLSS

SEQ ID NO: 99809 - protein, 31 aa, Artificial Sequence
  Cyclic GFR-binding peptide
EYVRKKPKLPYVKLHQGQHPKIRFFLMSLSS

SEQ ID NO: 99810 - protein, 29 aa, Artificial Sequence
  Cyclic GFR-binding peptide
EYVRKKPKLPYVKLVVNKNEDFFLISLSS

SEQ ID NO: 99811 - protein, 29 aa, Artificial Sequence
  Cyclic GFR-binding peptide
EYVRKKPKLPYVKLVVNNASDFFLISLSS

SEQ ID NO: 99812 - protein, 29 aa, Artificial Sequence
  Cyclic GFR-binding peptide
EYVRKKPKLPYVKLVVKENEDFFLMSLSS

SEQ ID NO: 99813 - protein, 29 aa, Artificial Sequence
  Cyclic GFR-binding peptide
EYVRKKPKLPYVKLIVNNSSDFFLVSLSS

SEQ ID NO: 99814 - protein, 31 aa, Artificial Sequence
  Cyclic GFR-binding peptide
EYVRKKPKLPYVKLLKPKKRVYEFFLVSLSS

SEQ ID NO: 99815 - protein, 29 aa, Artificial Sequence
  Cyclic GFR-binding peptide
EYVRKKPKLPYVKLLLVRGNDFFLMSLSS

SEQ ID NO: 99816 - protein, 29 aa, Artificial Sequence
  Cyclic GFR-binding peptide
EYVRKKPKLPYVKLVVKDYEDFFLMSLSS

SEQ ID NO: 99817 - protein, 29 aa, Artificial Sequence
  Cyclic GFR-binding peptide
EYVRKKPKLPYVKLVVNNAADFFLISLSS

SEQ ID NO: 99818 - protein, 29 aa, Artificial Sequence
  Cyclic GFR-binding peptide
SSLSILFFDKGVVTYLKVYPEYVRKKPKL

SEQ ID NO: 99819 - protein, 29 aa, Artificial Sequence
  Cyclic GFR-binding peptide
SSLSILFFIGKTPKILKVYPEYVRKKPKL

SEQ ID NO: 99820 - protein, 29 aa, Artificial Sequence
  Cyclic GFR-binding peptide
SSLSMLFFNDKQQIILKVYPEYVRKKPKL

SEQ ID NO: 99821 - protein, 29 aa, Artificial Sequence
  Cyclic GFR-binding peptide
SSLSVLFFDDSSNVILKVYPEYVRKKPKL

SEQ ID NO: 99822 - protein, 29 aa, Artificial Sequence
  Cyclic GFR-binding peptide
SSLSILFFVGRKPKVLKVYPEYVRKKPKL

SEQ ID NO: 99823 - protein, 29 aa, Artificial Sequence
  Cyclic GFR-binding peptide
SSLSILFFVGRTPKVLKVYPEYVRKKPKL

SEQ ID NO: 99824 - protein, 29 aa, Artificial Sequence
  Cyclic GFR-binding peptide
SSLSVLFFDDMGVPTLKVYPEYVRKKPKL

SEQ ID NO: 99825 - protein, 31 aa, Artificial Sequence
  Cyclic GFR-binding peptide
SSLSMLFFRIKPHQGQHLKVYPEYVRKKPKL

SEQ ID NO: 99826 - protein, 29 aa, Artificial Sequence
  Cyclic GFR-binding peptide
SSLSILFFDENKNVVLKVYPEYVRKKPKL

SEQ ID NO: 99827 - protein, 29 aa, Artificial Sequence
  Cyclic GFR-binding peptide
SSLSILFFDSANNVVLKVYPEYVRKKPKL

SEQ ID NO: 99828 - protein, 29 aa, Artificial Sequence
  Cyclic GFR-binding peptide
SSLSMLFFDENEKVVLKVYPEYVRKKPKL

SEQ ID NO: 99829 - protein, 29 aa, Artificial Sequence
  Cyclic GFR-binding peptide
SSLSVLFFDSSNNVILKVYPEYVRKKPKL

SEQ ID NO: 99830 - protein, 31 aa, Artificial Sequence
  Cyclic GFR-binding peptide
SSLSVLFFEYVRKKPKLLKVYPEYVRKKPKL

SEQ ID NO: 99831 - protein, 29 aa, Artificial Sequence
  Cyclic GFR-binding peptide
SSLSMLFFDNGRVLLLKVYPEYVRKKPKL

SEQ ID NO: 99832 - protein, 29 aa, Artificial Sequence
  Cyclic GFR-binding peptide
SSLSMLFFDEYDKVVLKVYPEYVRKKPKL

SEQ ID NO: 99833 - protein, 29 aa, Artificial Sequence
  Cyclic GFR-binding peptide
SSLSILFFDAANNVVLKVYPEYVRKKPKL

SEQ ID NO: 99834 - protein, 29 aa, Artificial Sequence
  Cyclic GFR-binding peptide
EYVRKKPKLSMEGIIVNSSDDMIQVTINS

SEQ ID NO: 99835 - protein, 29 aa, Artificial Sequence
  Cyclic GFR-binding peptide
EYVRKKPKLVTAKKVVKENEDIKRMQVPR

SEQ ID NO: 99836 - protein, 29 aa, Artificial Sequence
  Cyclic GFR-binding peptide
EYVRKKPKLSMEGIVVKDYEDMIQMTINS

SEQ ID NO: 99837 - protein, 29 aa, Artificial Sequence
  Cyclic GFR-binding peptide
EYVRKKPKLVTAKKIKPTKGIIKRIQVPR

SEQ ID NO: 99838 - protein, 29 aa, Artificial Sequence
  Cyclic GFR-binding peptide
EYVRKKPKLSMEGIVKPTRGVMIQITINS

SEQ ID NO: 99839 - protein, 31 aa, Artificial Sequence
  Cyclic GFR-binding peptide
EYVRKKPKLNSLQEFIPKKRVIEYYVVPLPE

SEQ ID NO: 99840 - protein, 29 aa, Artificial Sequence
  Cyclic GFR-binding peptide
EYVRKKPKLVQVEKVKPKRGVVKAIKVSR

SEQ ID NO: 99841 - protein, 29 aa, Artificial Sequence
  Cyclic GFR-binding peptide
EYVRKKPKLVQVEKVVKENEDVKAMKVSR

SEQ ID NO: 99842 - protein, 29 aa, Artificial Sequence
  Cyclic GFR-binding peptide
EYVRKKPKLVTAKKIVNSSDDIKRVQVPR

SEQ ID NO: 99843 - protein, 29 aa, Artificial Sequence
  Cyclic GFR-binding peptide
EYVRKKPKLVQVEKIKPTKGIVKAIKVSR

SEQ ID NO: 99844 - protein, 31 aa, Artificial Sequence
  Cyclic GFR-binding peptide
EYVRKKPKLNSLQEFIPKKRVIEYYLVTLPE

SEQ ID NO: 99845 - protein, 29 aa, Artificial Sequence
  Cyclic GFR-binding peptide
EYVRKKPKLVQVEKIVNSSDDVKAVKVSR

SEQ ID NO: 99846 - protein, 29 aa, Artificial Sequence
  Cyclic GFR-binding peptide
EYVRKKPKLVTAKKVKPKRGVIKRIQVPR

SEQ ID NO: 99847 - protein, 29 aa, Artificial Sequence
  Cyclic GFR-binding peptide
EYVRKKPKLVQVEKVKPTRGVVKAIKVSR

SEQ ID NO: 99848 - protein, 29 aa, Artificial Sequence
  Cyclic GFR-binding peptide
EYVRKKPKLVTAKKVKPTRGVIKRIQVPR

SEQ ID NO: 99849 - protein, 31 aa, Artificial Sequence
  Cyclic GFR-binding peptide
EYVRKKPKLNSLQELKPKKRVYEYYLVTLPE

SEQ ID NO: 99850 - protein, 29 aa, Artificial Sequence
  Cyclic GFR-binding peptide
EYVRKKPKLSMEGIVKPKRGVMIQITINS

SEQ ID NO: 99851 - protein, 29 aa, Artificial Sequence
  Cyclic GFR-binding peptide
EYVRKKPKLSMEGIVVKENEDMIQMTINS

SEQ ID NO: 99852 - protein, 29 aa, Artificial Sequence
  Cyclic GFR-binding peptide
EYVRKKPKLSMEGIIKPTKGIMIQITINS

SEQ ID NO: 99853 - protein, 31 aa, Artificial Sequence
  Cyclic GFR-binding peptide
EYVRKKPKLNSLQEHQGQHPKIRYYLMTLPE

SEQ ID NO: 99854 - protein, 29 aa, Artificial Sequence
  Cyclic GFR-binding peptide
EYVRKKPKLVTAKKVVKDYEDIKRMQVPR

SEQ ID NO: 99855 - protein, 31 aa, Artificial Sequence
  Cyclic GFR-binding peptide
EYVRKKPKLNSLQEHQGQHPKIRYYVMPLPE

SEQ ID NO: 99856 - protein, 31 aa, Artificial Sequence
  Cyclic GFR-binding peptide
EYVRKKPKLNSLQELKPKKRVYEYYVVPLPE

SEQ ID NO: 99857 - protein, 29 aa, Artificial Sequence
  Cyclic GFR-binding peptide
EYVRKKPKLVQVEKVVKDYEDVKAMKVSR

SEQ ID NO: 99858 - protein, 29 aa, Artificial Sequence
  Cyclic GFR-binding peptide
SNITVQIMDDSSNVIIGEMSEYVRKKPKL

SEQ ID NO: 99859 - protein, 29 aa, Artificial Sequence
  Cyclic GFR-binding peptide
RPVQMRKIDENEKVVKKATVEYVRKKPKL

SEQ ID NO: 99860 - protein, 29 aa, Artificial Sequence
  Cyclic GFR-binding peptide
SNITMQIMDEYDKVVIGEMSEYVRKKPKL

SEQ ID NO: 99861 - protein, 29 aa, Artificial Sequence
  Cyclic GFR-binding peptide
RPVQIRKIIGKTPKIKKATVEYVRKKPKL

SEQ ID NO: 99862 - protein, 29 aa, Artificial Sequence
  Cyclic GFR-binding peptide
SNITIQIMVGRTPKVIGEMSEYVRKKPKL

SEQ ID NO: 99863 - protein, 31 aa, Artificial Sequence
  Cyclic GFR-binding peptide
EPLPVVYYEIVRKKPIFEQLSNEYVRKKPKL

SEQ ID NO: 99864 - protein, 29 aa, Artificial Sequence
  Cyclic GFR-binding peptide
RSVKIAKVVGRKPKVKEVQVEYVRKKPKL

SEQ ID NO: 99865 - protein, 29 aa, Artificial Sequence
  Cyclic GFR-binding peptide
RSVKMAKVDENEKVVKEVQVEYVRKKPKL

SEQ ID NO: 99866 - protein, 29 aa, Artificial Sequence
  Cyclic GFR-binding peptide
RPVQVRKIDDSSNVIKKATVEYVRKKPKL

SEQ ID NO: 99867 - protein, 29 aa, Artificial Sequence
  Cyclic GFR-binding peptide
RSVKIAKVIGKTPKIKEVQVEYVRKKPKL

SEQ ID NO: 99868 - protein, 31 aa, Artificial Sequence
  Cyclic GFR-binding peptide
EPLTVLYYEIVRKKPIFEQLSNEYVRKKPKL

SEQ ID NO: 99869 - protein, 29 aa, Artificial Sequence
  Cyclic GFR-binding peptide
RSVKVAKVDDSSNVIKEVQVEYVRKKPKL

SEQ ID NO: 99870 - protein, 29 aa, Artificial Sequence
  Cyclic GFR-binding peptide
RPVQIRKIVGRKPKVKKATVEYVRKKPKL

SEQ ID NO: 99871 - protein, 29 aa, Artificial Sequence
  Cyclic GFR-binding peptide
RSVKIAKVVGRTPKVKEVQVEYVRKKPKL

SEQ ID NO: 99872 - protein, 29 aa, Artificial Sequence
  Cyclic GFR-binding peptide
RPVQIRKIVGRTPKVKKATVEYVRKKPKL

SEQ ID NO: 99873 - protein, 31 aa, Artificial Sequence
  Cyclic GFR-binding peptide
EPLTVLYYEYVRKKPKLEQLSNEYVRKKPKL

SEQ ID NO: 99874 - protein, 29 aa, Artificial Sequence
  Cyclic GFR-binding peptide
SNITIQIMVGRKPKVIGEMSEYVRKKPKL

SEQ ID NO: 99875 - protein, 29 aa, Artificial Sequence
  Cyclic GFR-binding peptide
SNITMQIMDENEKVVIGEMSEYVRKKPKL

SEQ ID NO: 99876 - protein, 29 aa, Artificial Sequence
  Cyclic GFR-binding peptide
SNITIQIMIGKTPKIIGEMSEYVRKKPKL

SEQ ID NO: 99877 - protein, 31 aa, Artificial Sequence
  Cyclic GFR-binding peptide
EPLTMLYYRIKPHQGQHEQLSNEYVRKKPKL

SEQ ID NO: 99878 - protein, 29 aa, Artificial Sequence
  Cyclic GFR-binding peptide
RPVQMRKIDEYDKVVKKATVEYVRKKPKL

SEQ ID NO: 99879 - protein, 31 aa, Artificial Sequence
  Cyclic GFR-binding peptide
EPLPMVYYRIKPHQGQHEQLSNEYVRKKPKL

SEQ ID NO: 99880 - protein, 31 aa, Artificial Sequence
  Cyclic GFR-binding peptide
EPLPVVYYEYVRKKPKLEQLSNEYVRKKPKL

SEQ ID NO: 99881 - protein, 29 aa, Artificial Sequence
  Cyclic GFR-binding peptide
RSVKMAKVDEYDKVVKEVQVEYVRKKPKL

SEQ ID NO: 99882 - protein, 29 aa, Artificial Sequence
  Cyclic GFR-binding peptide
EYVRKKPKLRYKKLIIQQKDNFYLMSIAN

SEQ ID NO: 99883 - protein, 29 aa, Artificial Sequence
  Cyclic GFR-binding peptide
EYVRKKPKLRYKKLLLVRGNDFYLMSIAN

SEQ ID NO: 99884 - protein, 29 aa, Artificial Sequence
  Cyclic GFR-binding peptide
NAISMLYFNDKQQIILKKYREYVRKKPKL

SEQ ID NO: 99885 - protein, 29 aa, Artificial Sequence
  Cyclic GFR-binding peptide
NAISMLYFDNGRVLLLKKYREYVRKKPKL

SEQ ID NO: 99886 - protein, 29 aa, Artificial Sequence
  Cyclic GFR-binding peptide
EYVRKKPKLEYKFKVVNKNEDLYLISIPE

SEQ ID NO: 99887 - protein, 29 aa, Artificial Sequence
  Cyclic GFR-binding peptide
EYVRKKPKLPIKGYVKPTRGVFYLINIPS

SEQ ID NO: 99888 - protein, 29 aa, Artificial Sequence
  Cyclic GFR-binding peptide
EYVRKKPKLEYKFKLLVRGNDLYLMSIPE

SEQ ID NO: 99889 - protein, 29 aa, Artificial Sequence
  Cyclic GFR-binding peptide
EYVRKKPKLYHYKLVVNKNEDKYLISIPS

SEQ ID NO: 99890 - protein, 29 aa, Artificial Sequence
  Cyclic GFR-binding peptide
EYVRKKPKLRHKRLLLVRGNDYYLMSTAS

SEQ ID NO: 99891 - protein, 29 aa, Artificial Sequence
  Cyclic GFR-binding peptide
EYVRKKPKLYHYKLLLVRGNDKYLMSIPS

SEQ ID NO: 99892 - protein, 29 aa, Artificial Sequence
  Cyclic GFR-binding peptide
EYVRKKPKLRHKRLVVNKNEDYYLISTAS

SEQ ID NO: 99893 - protein, 29 aa, Artificial Sequence
  Cyclic GFR-binding peptide
EYVRKKPKLRYKKLVVNKNEDFYLISIAN

SEQ ID NO: 99894 - protein, 29 aa, Artificial Sequence
  Cyclic GFR-binding peptide
EYVRKKPKLPIKGYVVNKNEDFYLINIPS

SEQ ID NO: 99895 - protein, 29 aa, Artificial Sequence
  Cyclic GFR-binding peptide
EYVRKKPKLPIKGYIKPTKGIFYLINIPS

SEQ ID NO: 99896 - protein, 29 aa, Artificial Sequence
  Cyclic GFR-binding peptide
EYVRKKPKLRHKRLYTVVGKDYYLISTAS

SEQ ID NO: 99897 - protein, 29 aa, Artificial Sequence
  Cyclic GFR-binding peptide
EYVRKKPKLEYKFKVVNNASDLYLISIPE

SEQ ID NO: 99898 - protein, 29 aa, Artificial Sequence
  Cyclic GFR-binding peptide
EYVRKKPKLRHKRLIIQQKDNYYLMSTAS

SEQ ID NO: 99899 - protein, 29 aa, Artificial Sequence
  Cyclic GFR-binding peptide
EYVRKKPKLEYKFKIIQQKDNLYLMSIPE

SEQ ID NO: 99900 - protein, 29 aa, Artificial Sequence
  Cyclic GFR-binding peptide
EYVRKKPKLPIKGYVKPKRGVFYLINIPS

SEQ ID NO: 99901 - protein, 29 aa, Artificial Sequence
  Cyclic GFR-binding peptide
EYVRKKPKLRHKRLVVNNASDYYLISTAS

SEQ ID NO: 99902 - protein, 29 aa, Artificial Sequence
  Cyclic GFR-binding peptide
EYVRKKPKLYHYKLVVNNASDKYLISIPS

SEQ ID NO: 99903 - protein, 29 aa, Artificial Sequence
  Cyclic GFR-binding peptide
EYVRKKPKLYHYKLIIQQKDNKYLMSIPS

SEQ ID NO: 99904 - protein, 29 aa, Artificial Sequence
  Cyclic GFR-binding peptide
EYVRKKPKLRHKRLVVNNAADYYLISTAS

SEQ ID NO: 99905 - protein, 29 aa, Artificial Sequence
  Cyclic GFR-binding peptide
EPISILYLDENKNVVKFKYEEYVRKKPKL

SEQ ID NO: 99906 - protein, 29 aa, Artificial Sequence
  Cyclic GFR-binding peptide
SPINILYFVGRTPKVYGKIPEYVRKKPKL

SEQ ID NO: 99907 - protein, 29 aa, Artificial Sequence
  Cyclic GFR-binding peptide
EPISMLYLDNGRVLLKFKYEEYVRKKPKL

SEQ ID NO: 99908 - protein, 29 aa, Artificial Sequence
  Cyclic GFR-binding peptide
SPISILYKDENKNVVLKYHYEYVRKKPKL

SEQ ID NO: 99909 - protein, 29 aa, Artificial Sequence
  Cyclic GFR-binding peptide
SATSMLYYDNGRVLLLRKHREYVRKKPKL

SEQ ID NO: 99910 - protein, 29 aa, Artificial Sequence
  Cyclic GFR-binding peptide
SPISMLYKDNGRVLLLKYHYEYVRKKPKL

SEQ ID NO: 99911 - protein, 29 aa, Artificial Sequence
  Cyclic GFR-binding peptide
SATSILYYDENKNVVLRKHREYVRKKPKL

SEQ ID NO: 99912 - protein, 29 aa, Artificial Sequence
  Cyclic GFR-binding peptide
NAISILYFDENKNVVLKKYREYVRKKPKL

SEQ ID NO: 99913 - protein, 29 aa, Artificial Sequence
  Cyclic GFR-binding peptide
SPINILYFDENKNVVYGKIPEYVRKKPKL

SEQ ID NO: 99914 - protein, 29 aa, Artificial Sequence
  Cyclic GFR-binding peptide
SPINILYFIGKTPKIYGKIPEYVRKKPKL

SEQ ID NO: 99915 - protein, 29 aa, Artificial Sequence
  Cyclic GFR-binding peptide
SATSILYYDKGVVTYLRKHREYVRKKPKL

SEQ ID NO: 99916 - protein, 29 aa, Artificial Sequence
  Cyclic GFR-binding peptide
EPISILYLDSANNVVKFKYEEYVRKKPKL

SEQ ID NO: 99917 - protein, 29 aa, Artificial Sequence
  Cyclic GFR-binding peptide
SATSMLYYNDKQQIILRKHREYVRKKPKL

SEQ ID NO: 99918 - protein, 29 aa, Artificial Sequence
  Cyclic GFR-binding peptide
EPISMLYLNDKQQIIKFKYEEYVRKKPKL

SEQ ID NO: 99919 - protein, 29 aa, Artificial Sequence
  Cyclic GFR-binding peptide
SPINILYFVGRKPKVYGKIPEYVRKKPKL

SEQ ID NO: 99920 - protein, 29 aa, Artificial Sequence
  Cyclic GFR-binding peptide
SATSILYYDSANNVVLRKHREYVRKKPKL

SEQ ID NO: 99921 - protein, 29 aa, Artificial Sequence
  Cyclic GFR-binding peptide
SPISILYKDSANNVVLKYHYEYVRKKPKL

SEQ ID NO: 99922 - protein, 29 aa, Artificial Sequence
  Cyclic GFR-binding peptide
SPISMLYKNDKQQIILKYHYEYVRKKPKL

SEQ ID NO: 99923 - protein, 29 aa, Artificial Sequence
  Cyclic GFR-binding peptide
SATSILYYDAANNVVLRKHREYVRKKPKL

SEQ ID NO: 99924 - protein, 29 aa, Artificial Sequence
  Cyclic GFR-binding peptide
EYVRKKPKLSMEGIIIQQKDNMIQMTINS

SEQ ID NO: 99925 - protein, 29 aa, Artificial Sequence
  Cyclic GFR-binding peptide
EYVRKKPKLSMEGLVKPKRGVMIQITINS

SEQ ID NO: 99926 - protein, 29 aa, Artificial Sequence
  Cyclic GFR-binding peptide
EYVRKKPKLSMEGLVVNNASDMIQITINS

SEQ ID NO: 99927 - protein, 29 aa, Artificial Sequence
  Cyclic GFR-binding peptide
EYVRKKPKLSMEGILLVRGNDMIQMTINS

SEQ ID NO: 99928 - protein, 29 aa, Artificial Sequence
  Cyclic GFR-binding peptide
EYVRKKPKLSMEGLIKPTKGIMIQITINS

SEQ ID NO: 99929 - protein, 29 aa, Artificial Sequence
  Cyclic GFR-binding peptide
EYVRKKPKLSMEGLIVNSSDDMIQVTINS

SEQ ID NO: 99930 - protein, 29 aa, Artificial Sequence
  Cyclic GFR-binding peptide
EYVRKKPKLSMEGIVVNNASDMIQITINS

SEQ ID NO: 99931 - protein, 29 aa, Artificial Sequence
  Cyclic GFR-binding peptide
EYVRKKPKLSMEGLVVNNAADMIQITINS

SEQ ID NO: 99932 - protein, 29 aa, Artificial Sequence
  Cyclic GFR-binding peptide
EYVRKKPKLSMEGLLLVRGNDMIQMTINS

SEQ ID NO: 99933 - protein, 29 aa, Artificial Sequence
  Cyclic GFR-binding peptide
EYVRKKPKLSMEGLIIQQKDNMIQMTINS

SEQ ID NO: 99934 - protein, 29 aa, Artificial Sequence
  Cyclic GFR-binding peptide
EYVRKKPKLSMEGIVVNNAADMIQITINS

SEQ ID NO: 99935 - protein, 29 aa, Artificial Sequence
  Cyclic GFR-binding peptide
EYVRKKPKLSMEGLVKPTRGVMIQITINS

SEQ ID NO: 99936 - protein, 29 aa, Artificial Sequence
  Cyclic GFR-binding peptide
SNITMQIMNDKQQIIIGEMSEYVRKKPKL

SEQ ID NO: 99937 - protein, 29 aa, Artificial Sequence
  Cyclic GFR-binding peptide
SNITIQIMVGRKPKVLGEMSEYVRKKPKL

SEQ ID NO: 99938 - protein, 29 aa, Artificial Sequence
  Cyclic GFR-binding peptide
SNITIQIMDSANNVVLGEMSEYVRKKPKL

SEQ ID NO: 99939 - protein, 29 aa, Artificial Sequence
  Cyclic GFR-binding peptide
SNITMQIMDNGRVLLIGEMSEYVRKKPKL

SEQ ID NO: 99940 - protein, 29 aa, Artificial Sequence
  Cyclic GFR-binding peptide
SNITIQIMIGKTPKILGEMSEYVRKKPKL

SEQ ID NO: 99941 - protein, 29 aa, Artificial Sequence
  Cyclic GFR-binding peptide
SNITVQIMDDSSNVILGEMSEYVRKKPKL

SEQ ID NO: 99942 - protein, 29 aa, Artificial Sequence
  Cyclic GFR-binding peptide
SNITIQIMDSANNVVIGEMSEYVRKKPKL

SEQ ID NO: 99943 - protein, 29 aa, Artificial Sequence
  Cyclic GFR-binding peptide
SNITIQIMDAANNVVLGEMSEYVRKKPKL

SEQ ID NO: 99944 - protein, 29 aa, Artificial Sequence
  Cyclic GFR-binding peptide
SNITMQIMDNGRVLLLGEMSEYVRKKPKL

SEQ ID NO: 99945 - protein, 29 aa, Artificial Sequence
  Cyclic GFR-binding peptide
SNITMQIMNDKQQIILGEMSEYVRKKPKL

SEQ ID NO: 99946 - protein, 29 aa, Artificial Sequence
  Cyclic GFR-binding peptide
SNITIQIMDAANNVVIGEMSEYVRKKPKL

SEQ ID NO: 99947 - protein, 29 aa, Artificial Sequence
  Cyclic GFR-binding peptide
SNITIQIMVGRTPKVLGEMSEYVRKKPKL

SEQ ID NO: 99948 - protein, 29 aa, Artificial Sequence
  Cyclic GFR-binding peptide
EYVRKKPKLQYNKLVVNKNEDLYLISIAS

SEQ ID NO: 99949 - protein, 29 aa, Artificial Sequence
  Cyclic GFR-binding peptide
EYVRKKPKLQYNKLVVNNAADLYLISIAS

SEQ ID NO: 99950 - protein, 29 aa, Artificial Sequence
  Cyclic GFR-binding peptide
EYVRKKPKLQYNKLIIQQKDNLYLMSIAS

SEQ ID NO: 99951 - protein, 29 aa, Artificial Sequence
  Cyclic GFR-binding peptide
EYVRKKPKLQYNKLLLVRGNDLYLMSIAS

SEQ ID NO: 99952 - protein, 29 aa, Artificial Sequence
  Cyclic GFR-binding peptide
EYVRKKPKLQYNKLYTVVGKDLYLISIAS

SEQ ID NO: 99953 - protein, 29 aa, Artificial Sequence
  Cyclic GFR-binding peptide
SAISILYLDENKNVVLKNYQEYVRKKPKL

SEQ ID NO: 99954 - protein, 29 aa, Artificial Sequence
  Cyclic GFR-binding peptide
SAISILYLDAANNVVLKNYQEYVRKKPKL

SEQ ID NO: 99955 - protein, 29 aa, Artificial Sequence
  Cyclic GFR-binding peptide
SAISMLYLNDKQQIILKNYQEYVRKKPKL

SEQ ID NO: 99956 - protein, 29 aa, Artificial Sequence
  Cyclic GFR-binding peptide
SAISMLYLDNGRVLLLKNYQEYVRKKPKL

SEQ ID NO: 99957 - protein, 29 aa, Artificial Sequence
  Cyclic GFR-binding peptide
SAISILYLDKGVVTYLKNYQEYVRKKPKL

SEQ ID NO: 99958 - protein, 29 aa, Artificial Sequence
  Cyclic GFR-binding peptide
EIVRKKPIFRYKKLIKPTKGIFYLISIAN

SEQ ID NO: 99959 - protein, 31 aa, Artificial Sequence
  Cyclic GFR-binding peptide
EIVRKKPIFRHKRLFIPKKRVIEYYLVSTAS

SEQ ID NO: 99960 - protein, 29 aa, Artificial Sequence
  Cyclic GFR-binding peptide
EIVRKKPIFYHYKLVVKDYEDKYLMSIPS

SEQ ID NO: 99961 - protein, 29 aa, Artificial Sequence
  Cyclic GFR-binding peptide
EIVRKKPIFQYNKLIVNNSSDLYLVSIAS

SEQ ID NO: 99962 - protein, 29 aa, Artificial Sequence
  Cyclic GFR-binding peptide
EIVRKKPIFRYKKLVVKDYEDFYLMSIAN

SEQ ID NO: 99963 - protein, 29 aa, Artificial Sequence
  Cyclic GFR-binding peptide
EIVRKKPIFRYKKLVKPTRGVFYLISIAN

SEQ ID NO: 99964 - protein, 29 aa, Artificial Sequence
  Cyclic GFR-binding peptide
EIVRKKPIFRHKRLVVKENEDYYLMSTAS

SEQ ID NO: 99965 - protein, 29 aa, Artificial Sequence
  Cyclic GFR-binding peptide
EIVRKKPIFYHYKLIKPTKGIKYLISIPS

SEQ ID NO: 99966 - protein, 31 aa, Artificial Sequence
  Cyclic GFR-binding peptide
EIVRKKPIFRYKKLFIPKKRVIEFYLVSIAN

SEQ ID NO: 99967 - protein, 29 aa, Artificial Sequence
  Cyclic GFR-binding peptide
EIVRKKPIFYHYKLVVKENEDKYLMSIPS

SEQ ID NO: 99968 - protein, 29 aa, Artificial Sequence
  Cyclic GFR-binding peptide
EIVRKKPIFRHKRLVKPKRGVYYLISTAS

SEQ ID NO: 99969 - protein, 29 aa, Artificial Sequence
  Cyclic GFR-binding peptide
EIVRKKPIFYHYKLVKPKRGVKYLISIPS

SEQ ID NO: 99970 - protein, 31 aa, Artificial Sequence
  Cyclic GFR-binding peptide
EIVRKKPIFQYNKLFIPKKRVIELYLVSIAS

SEQ ID NO: 99971 - protein, 29 aa, Artificial Sequence
  Cyclic GFR-binding peptide
EIVRKKPIFQYNKLVKPTRGVLYLISIAS

SEQ ID NO: 99972 - protein, 29 aa, Artificial Sequence
  Cyclic GFR-binding peptide
EIVRKKPIFRYKKLVVKENEDFYLMSIAN

SEQ ID NO: 99973 - protein, 29 aa, Artificial Sequence
  Cyclic GFR-binding peptide
EIVRKKPIFQYNKLTPVGMDDLYLVSIAS

SEQ ID NO: 99974 - protein, 29 aa, Artificial Sequence
  Cyclic GFR-binding peptide
EIVRKKPIFRYKKLTPVGMDDFYLVSIAN

SEQ ID NO: 99975 - protein, 29 aa, Artificial Sequence
  Cyclic GFR-binding peptide
EIVRKKPIFRYKKLVKPKRGVFYLISIAN

SEQ ID NO: 99976 - protein, 29 aa, Artificial Sequence
  Cyclic GFR-binding peptide
EIVRKKPIFQYNKLVVKENEDLYLMSIAS

SEQ ID NO: 99977 - protein, 29 aa, Artificial Sequence
  Cyclic GFR-binding peptide
EIVRKKPIFYHYKLIVNSSDDKYLVSIPS

SEQ ID NO: 99978 - protein, 29 aa, Artificial Sequence
  Cyclic GFR-binding peptide
EIVRKKPIFQYNKLVKPKRGVLYLISIAS

SEQ ID NO: 99979 - protein, 29 aa, Artificial Sequence
  Cyclic GFR-binding peptide
EIVRKKPIFRYKKLIVNNSSDFYLVSIAN

SEQ ID NO: 99980 - protein, 29 aa, Artificial Sequence
  Cyclic GFR-binding peptide
EIVRKKPIFRYKKLIVNSSDDFYLVSIAN

SEQ ID NO: 99981 - protein, 29 aa, Artificial Sequence
  Cyclic GFR-binding peptide
EIVRKKPIFRHKRLVKPTRGVYYLISTAS

SEQ ID NO: 99982 - protein, 31 aa, Artificial Sequence
  Cyclic GFR-binding peptide
EIVRKKPIFYHYKLFIPKKRVIEKYLVSIPS

SEQ ID NO: 99983 - protein, 29 aa, Artificial Sequence
  Cyclic GFR-binding peptide
EIVRKKPIFRHKRLIKPTKGIYYLISTAS

SEQ ID NO: 99984 - protein, 29 aa, Artificial Sequence
  Cyclic GFR-binding peptide
EIVRKKPIFRHKRLTPVGMDDYYLVSTAS

SEQ ID NO: 99985 - protein, 29 aa, Artificial Sequence
  Cyclic GFR-binding peptide
EIVRKKPIFYHYKLTPVGMDDKYLVSIPS

SEQ ID NO: 99986 - protein, 29 aa, Artificial Sequence
  Cyclic GFR-binding peptide
EIVRKKPIFYHYKLIVNNSSDKYLVSIPS

SEQ ID NO: 99987 - protein, 29 aa, Artificial Sequence
  Cyclic GFR-binding peptide
EIVRKKPIFRHKRLIVNNSSDYYLVSTAS

SEQ ID NO: 99988 - protein, 29 aa, Artificial Sequence
  Cyclic GFR-binding peptide
EIVRKKPIFYHYKLVKPTRGVKYLISIPS

SEQ ID NO: 99989 - protein, 29 aa, Artificial Sequence
  Cyclic GFR-binding peptide
EIVRKKPIFRHKRLIVNSSDDYYLVSTAS

SEQ ID NO: 99990 - protein, 29 aa, Artificial Sequence
  Cyclic GFR-binding peptide
EIVRKKPIFRHKRLVVKDYEDYYLMSTAS

SEQ ID NO: 99991 - protein, 29 aa, Artificial Sequence
  Cyclic GFR-binding peptide
EIVRKKPIFQYNKLIKPTKGILYLISIAS

SEQ ID NO: 99992 - protein, 29 aa, Artificial Sequence
  Cyclic GFR-binding peptide
EIVRKKPIFQYNKLVVKDYEDLYLMSIAS

SEQ ID NO: 99993 - protein, 29 aa, Artificial Sequence
  Cyclic GFR-binding peptide
EIVRKKPIFQYNKLIVNSSDDLYLVSIAS

SEQ ID NO: 99994 - protein, 29 aa, Artificial Sequence
  Cyclic GFR-binding peptide
NAISILYFIGKTPKILKKYREIVRKKPIF

SEQ ID NO: 99995 - protein, 31 aa, Artificial Sequence
  Cyclic GFR-binding peptide
SATSVLYYEIVRKKPIFLRKHREIVRKKPIF

SEQ ID NO: 99996 - protein, 29 aa, Artificial Sequence
  Cyclic GFR-binding peptide
SPISMLYKDEYDKVVLKYHYEIVRKKPIF

SEQ ID NO: 99997 - protein, 29 aa, Artificial Sequence
  Cyclic GFR-binding peptide
SAISVLYLDSSNNVILKNYQEIVRKKPIF

SEQ ID NO: 99998 - protein, 29 aa, Artificial Sequence
  Cyclic GFR-binding peptide
NAISMLYFDEYDKVVLKKYREIVRKKPIF

SEQ ID NO: 99999 - protein, 29 aa, Artificial Sequence
  Cyclic GFR-binding peptide
NAISILYFVGRTPKVLKKYREIVRKKPIF

SEQ ID NO: 100000 - protein, 29 aa, Artificial Sequence
  Cyclic GFR-binding peptide
SATSMLYYDENEKVVLRKHREIVRKKPIF

SEQ ID NO: 100001 - protein, 29 aa, Artificial Sequence
  Cyclic GFR-binding peptide
SPISILYKIGKTPKILKYHYEIVRKKPIF

SEQ ID NO: 100002 - protein, 31 aa, Artificial Sequence
  Cyclic GFR-binding peptide
NAISVLYFEIVRKKPIFLKKYREIVRKKPIF

SEQ ID NO: 100003 - protein, 29 aa, Artificial Sequence
  Cyclic GFR-binding peptide
SPISMLYKDENEKVVLKYHYEIVRKKPIF

SEQ ID NO: 100004 - protein, 29 aa, Artificial Sequence
  Cyclic GFR-binding peptide
SATSILYYVGRKPKVLRKHREIVRKKPIF

SEQ ID NO: 100005 - protein, 29 aa, Artificial Sequence
  Cyclic GFR-binding peptide
SPISILYKVGRKPKVLKYHYEIVRKKPIF

SEQ ID NO: 100006 - protein, 29 aa, Artificial Sequence
  Cyclic GFR-binding peptide
SAISILYLVGRTPKVLKNYQEIVRKKPIF

SEQ ID NO: 100007 - protein, 29 aa, Artificial Sequence
  Cyclic GFR-binding peptide
NAISMLYFDENEKVVLKKYREIVRKKPIF

SEQ ID NO: 100008 - protein, 29 aa, Artificial Sequence
  Cyclic GFR-binding peptide
SAISVLYLDDMGVPTLKNYQEIVRKKPIF

SEQ ID NO: 100009 - protein, 29 aa, Artificial Sequence
  Cyclic GFR-binding peptide
NAISVLYFDDMGVPTLKKYREIVRKKPIF

SEQ ID NO: 100010 - protein, 29 aa, Artificial Sequence
  Cyclic GFR-binding peptide
NAISILYFVGRKPKVLKKYREIVRKKPIF

SEQ ID NO: 100011 - protein, 29 aa, Artificial Sequence
  Cyclic GFR-binding peptide
SAISMLYLDENEKVVLKNYQEIVRKKPIF

SEQ ID NO: 100012 - protein, 29 aa, Artificial Sequence
  Cyclic GFR-binding peptide
SPISVLYKDDSSNVILKYHYEIVRKKPIF

SEQ ID NO: 100013 - protein, 29 aa, Artificial Sequence
  Cyclic GFR-binding peptide
SAISILYLVGRKPKVLKNYQEIVRKKPIF

SEQ ID NO: 100014 - protein, 29 aa, Artificial Sequence
  Cyclic GFR-binding peptide
NAISVLYFDSSNNVILKKYREIVRKKPIF

SEQ ID NO: 100015 - protein, 29 aa, Artificial Sequence
  Cyclic GFR-binding peptide
NAISVLYFDDSSNVILKKYREIVRKKPIF

SEQ ID NO: 100016 - protein, 29 aa, Artificial Sequence
  Cyclic GFR-binding peptide
SATSILYYVGRTPKVLRKHREIVRKKPIF

SEQ ID NO: 100017 - protein, 31 aa, Artificial Sequence
  Cyclic GFR-binding peptide
SPISVLYKEIVRKKPIFLKYHYEIVRKKPIF

SEQ ID NO: 100018 - protein, 29 aa, Artificial Sequence
  Cyclic GFR-binding peptide
SATSILYYIGKTPKILRKHREIVRKKPIF

SEQ ID NO: 100019 - protein, 29 aa, Artificial Sequence
  Cyclic GFR-binding peptide
SATSVLYYDDMGVPTLRKHREIVRKKPIF

SEQ ID NO: 100020 - protein, 29 aa, Artificial Sequence
  Cyclic GFR-binding peptide
SPISVLYKDDMGVPTLKYHYEIVRKKPIF

SEQ ID NO: 100021 - protein, 29 aa, Artificial Sequence
  Cyclic GFR-binding peptide
SPISVLYKDSSNNVILKYHYEIVRKKPIF

SEQ ID NO: 100022 - protein, 29 aa, Artificial Sequence
  Cyclic GFR-binding peptide
SATSVLYYDSSNNVILRKHREIVRKKPIF

SEQ ID NO: 100023 - protein, 29 aa, Artificial Sequence
  Cyclic GFR-binding peptide
SPISILYKVGRTPKVLKYHYEIVRKKPIF

SEQ ID NO: 100024 - protein, 29 aa, Artificial Sequence
  Cyclic GFR-binding peptide
SATSVLYYDDSSNVILRKHREIVRKKPIF

SEQ ID NO: 100025 - protein, 29 aa, Artificial Sequence
  Cyclic GFR-binding peptide
SATSMLYYDEYDKVVLRKHREIVRKKPIF

SEQ ID NO: 100026 - protein, 29 aa, Artificial Sequence
  Cyclic GFR-binding peptide
SAISILYLIGKTPKILKNYQEIVRKKPIF

SEQ ID NO: 100027 - protein, 29 aa, Artificial Sequence
  Cyclic GFR-binding peptide
SAISMLYLDEYDKVVLKNYQEIVRKKPIF

SEQ ID NO: 100028 - protein, 29 aa, Artificial Sequence
  Cyclic GFR-binding peptide
SAISVLYLDDSSNVILKNYQEIVRKKPIF

SEQ ID NO: 100029 - protein, 29 aa, Artificial Sequence
  Cyclic GFR-binding peptide
EIVRKKPIFNSLQEVVKDYEDYYLMTLPE

SEQ ID NO: 100030 - protein, 29 aa, Artificial Sequence
  Cyclic GFR-binding peptide
EIVRKKPIFNSLQEIKPTKGIYYVIPLPE

SEQ ID NO: 100031 - protein, 29 aa, Artificial Sequence
  Cyclic GFR-binding peptide
EIVRKKPIFNSLQEVKPKRGVYYLITLPE

SEQ ID NO: 100032 - protein, 29 aa, Artificial Sequence
  Cyclic GFR-binding peptide
EIVRKKPIFNSLQEVKPTRGVYYVIPLPE

SEQ ID NO: 100033 - protein, 29 aa, Artificial Sequence
  Cyclic GFR-binding peptide
EIVRKKPIFEYQKYIVNSSDDIFLVSIPS

SEQ ID NO: 100034 - protein, 29 aa, Artificial Sequence
  Cyclic GFR-binding peptide
EIVRKKPIFEYQKYVKPTRGVIFLISIPS

SEQ ID NO: 100035 - protein, 29 aa, Artificial Sequence
  Cyclic GFR-binding peptide
EIVRKKPIFNSLQEVVKENEDYYLMTLPE

SEQ ID NO: 100036 - protein, 29 aa, Artificial Sequence
  Cyclic GFR-binding peptide
EIVRKKPIFNSLQEVVNNASDYYLITLPE

SEQ ID NO: 100037 - protein, 29 aa, Artificial Sequence
  Cyclic GFR-binding peptide
EIVRKKPIFNSLQEVKPKRGVYYVIPLPE

SEQ ID NO: 100038 - protein, 29 aa, Artificial Sequence
  Cyclic GFR-binding peptide
EIVRKKPIFNSLQEVVNNASDYYVIPLPE

SEQ ID NO: 100039 - protein, 29 aa, Artificial Sequence
  Cyclic GFR-binding peptide
EIVRKKPIFNSLQEVKPTRGVYYLITLPE

SEQ ID NO: 100040 - protein, 29 aa, Artificial Sequence
  Cyclic GFR-binding peptide
EIVRKKPIFEYQKYIKPTKGIIFLISIPS

SEQ ID NO: 100041 - protein, 29 aa, Artificial Sequence
  Cyclic GFR-binding peptide
EIVRKKPIFEYQKYVVNNASDIFLISIPS

SEQ ID NO: 100042 - protein, 29 aa, Artificial Sequence
  Cyclic GFR-binding peptide
EIVRKKPIFNSLQEIVNSSDDYYVVPLPE

SEQ ID NO: 100043 - protein, 29 aa, Artificial Sequence
  Cyclic GFR-binding peptide
EIVRKKPIFNSLQEVVKDYEDYYVMPLPE

SEQ ID NO: 100044 - protein, 29 aa, Artificial Sequence
  Cyclic GFR-binding peptide
EIVRKKPIFEYQKYVVKENEDIFLMSIPS

SEQ ID NO: 100045 - protein, 29 aa, Artificial Sequence
  Cyclic GFR-binding peptide
EIVRKKPIFNSLQEVVKENEDYYVMPLPE

SEQ ID NO: 100046 - protein, 29 aa, Artificial Sequence
  Cyclic GFR-binding peptide
EIVRKKPIFEYQKYVVKDYEDIFLMSIPS

SEQ ID NO: 100047 - protein, 29 aa, Artificial Sequence
  Cyclic GFR-binding peptide
EIVRKKPIFQYNKLVVNNASDLYLISIAS

SEQ ID NO: 100048 - protein, 29 aa, Artificial Sequence
  Cyclic GFR-binding peptide
EIVRKKPIFNSLQEIKPTKGIYYLITLPE

SEQ ID NO: 100049 - protein, 29 aa, Artificial Sequence
  Cyclic GFR-binding peptide
EIVRKKPIFEYQKYVKPKRGVIFLISIPS

SEQ ID NO: 100050 - protein, 29 aa, Artificial Sequence
  Cyclic GFR-binding peptide
EIVRKKPIFRYKKLVVNNASDFYLISIAN

SEQ ID NO: 100051 - protein, 29 aa, Artificial Sequence
  Cyclic GFR-binding peptide
EIVRKKPIFNSLQEIVNSSDDYYLVTLPE

SEQ ID NO: 100052 - protein, 29 aa, Artificial Sequence
  Cyclic GFR-binding peptide
EPLTMLYYDEYDKVVEQLSNEIVRKKPIF

SEQ ID NO: 100053 - protein, 29 aa, Artificial Sequence
  Cyclic GFR-binding peptide
EPLPIVYYIGKTPKIEQLSNEIVRKKPIF

SEQ ID NO: 100054 - protein, 29 aa, Artificial Sequence
  Cyclic GFR-binding peptide
EPLTILYYVGRKPKVEQLSNEIVRKKPIF

SEQ ID NO: 100055 - protein, 29 aa, Artificial Sequence
  Cyclic GFR-binding peptide
EPLPIVYYVGRTPKVEQLSNEIVRKKPIF

SEQ ID NO: 100056 - protein, 29 aa, Artificial Sequence
  Cyclic GFR-binding peptide
SPISVLFIDDSSNVIYKQYEEIVRKKPIF

SEQ ID NO: 100057 - protein, 29 aa, Artificial Sequence
  Cyclic GFR-binding peptide
SPISILFIVGRTPKVYKQYEEIVRKKPIF

SEQ ID NO: 100058 - protein, 29 aa, Artificial Sequence
  Cyclic GFR-binding peptide
EPLTMLYYDENEKVVEQLSNEIVRKKPIF

SEQ ID NO: 100059 - protein, 29 aa, Artificial Sequence
  Cyclic GFR-binding peptide
EPLTILYYDSANNVVEQLSNEIVRKKPIF

SEQ ID NO: 100060 - protein, 29 aa, Artificial Sequence
  Cyclic GFR-binding peptide
EPLPIVYYVGRKPKVEQLSNEIVRKKPIF

SEQ ID NO: 100061 - protein, 29 aa, Artificial Sequence
  Cyclic GFR-binding peptide
EPLPIVYYDSANNVVEQLSNEIVRKKPIF

SEQ ID NO: 100062 - protein, 29 aa, Artificial Sequence
  Cyclic GFR-binding peptide
EPLTILYYVGRTPKVEQLSNEIVRKKPIF

SEQ ID NO: 100063 - protein, 29 aa, Artificial Sequence
  Cyclic GFR-binding peptide
SPISILFIIGKTPKIYKQYEEIVRKKPIF

SEQ ID NO: 100064 - protein, 29 aa, Artificial Sequence
  Cyclic GFR-binding peptide
SPISILFIDSANNVVYKQYEEIVRKKPIF

SEQ ID NO: 100065 - protein, 29 aa, Artificial Sequence
  Cyclic GFR-binding peptide
EPLPVVYYDDSSNVIEQLSNEIVRKKPIF

SEQ ID NO: 100066 - protein, 29 aa, Artificial Sequence
  Cyclic GFR-binding peptide
EPLPMVYYDEYDKVVEQLSNEIVRKKPIF

SEQ ID NO: 100067 - protein, 29 aa, Artificial Sequence
  Cyclic GFR-binding peptide
SPISMLFIDENEKVVYKQYEEIVRKKPIF

SEQ ID NO: 100068 - protein, 29 aa, Artificial Sequence
  Cyclic GFR-binding peptide
EPLPMVYYDENEKVVEQLSNEIVRKKPIF

SEQ ID NO: 100069 - protein, 29 aa, Artificial Sequence
  Cyclic GFR-binding peptide
SPISMLFIDEYDKVVYKQYEEIVRKKPIF

SEQ ID NO: 100070 - protein, 29 aa, Artificial Sequence
  Cyclic GFR-binding peptide
SAISILYLDSANNVVLKNYQEIVRKKPIF

SEQ ID NO: 100071 - protein, 29 aa, Artificial Sequence
  Cyclic GFR-binding peptide
EPLTILYYIGKTPKIEQLSNEIVRKKPIF

SEQ ID NO: 100072 - protein, 29 aa, Artificial Sequence
  Cyclic GFR-binding peptide
SPISILFIVGRKPKVYKQYEEIVRKKPIF

SEQ ID NO: 100073 - protein, 29 aa, Artificial Sequence
  Cyclic GFR-binding peptide
NAISILYFDSANNVVLKKYREIVRKKPIF

SEQ ID NO: 100074 - protein, 29 aa, Artificial Sequence
  Cyclic GFR-binding peptide
EPLTVLYYDDSSNVIEQLSNEIVRKKPIF

SEQ ID NO: 100075 - protein, 31 aa, Artificial Sequence
  Cyclic GFR-binding peptide
EIVRKKPIFVTAKKLKPKKRVYEIKRVQVPR

SEQ ID NO: 100076 - protein, 31 aa, Artificial Sequence
  Cyclic GFR-binding peptide
EIVRKKPIFVQVEKLKPKKRVYEVKAVKVSR

SEQ ID NO: 100077 - protein, 31 aa, Artificial Sequence
  Cyclic GFR-binding peptide
EIVRKKPIFVQVEKFIPKKRVIEVKAVKVSR

SEQ ID NO: 100078 - protein, 31 aa, Artificial Sequence
  Cyclic GFR-binding peptide
EIVRKKPIFVQVEKHQGQHPKIRVKAMKVSR

SEQ ID NO: 100079 - protein, 31 aa, Artificial Sequence
  Cyclic GFR-binding peptide
EIVRKKPIFVTAKKHQGQHPKIRIKRMQVPR

SEQ ID NO: 100080 - protein, 31 aa, Artificial Sequence
  Cyclic GFR-binding peptide
EIVRKKPIFSMEGLLKPKKRVYEMIQVTINS

SEQ ID NO: 100081 - protein, 31 aa, Artificial Sequence
  Cyclic GFR-binding peptide
EIVRKKPIFSMEGIFIPKKRVIEMIQVTINS

SEQ ID NO: 100082 - protein, 31 aa, Artificial Sequence
  Cyclic GFR-binding peptide
EIVRKKPIFSMEGLHQGQHPKIRMIQMTINS

SEQ ID NO: 100083 - protein, 31 aa, Artificial Sequence
  Cyclic GFR-binding peptide
EIVRKKPIFSMEGILKPKKRVYEMIQVTINS

SEQ ID NO: 100084 - protein, 31 aa, Artificial Sequence
  Cyclic GFR-binding peptide
EIVRKKPIFSMEGLFIPKKRVIEMIQVTINS

SEQ ID NO: 100085 - protein, 31 aa, Artificial Sequence
  Cyclic GFR-binding peptide
EIVRKKPIFVTAKKFIPKKRVIEIKRVQVPR

SEQ ID NO: 100086 - protein, 31 aa, Artificial Sequence
  Cyclic GFR-binding peptide
EIVRKKPIFSMEGIHQGQHPKIRMIQMTINS

SEQ ID NO: 100087 - protein, 31 aa, Artificial Sequence
  Cyclic GFR-binding peptide
RPVQVRKIEYVRKKPKLKKATVEIVRKKPIF

SEQ ID NO: 100088 - protein, 31 aa, Artificial Sequence
  Cyclic GFR-binding peptide
RSVKVAKVEYVRKKPKLKEVQVEIVRKKPIF

SEQ ID NO: 100089 - protein, 31 aa, Artificial Sequence
  Cyclic GFR-binding peptide
RSVKVAKVEIVRKKPIFKEVQVEIVRKKPIF

SEQ ID NO: 100090 - protein, 31 aa, Artificial Sequence
  Cyclic GFR-binding peptide
RSVKMAKVRIKPHQGQHKEVQVEIVRKKPIF

SEQ ID NO: 100091 - protein, 31 aa, Artificial Sequence
  Cyclic GFR-binding peptide
RPVQMRKIRIKPHQGQHKKATVEIVRKKPIF

SEQ ID NO: 100092 - protein, 31 aa, Artificial Sequence
  Cyclic GFR-binding peptide
SNITVQIMEYVRKKPKLLGEMSEIVRKKPIF

SEQ ID NO: 100093 - protein, 31 aa, Artificial Sequence
  Cyclic GFR-binding peptide
SNITVQIMEIVRKKPIFIGEMSEIVRKKPIF

SEQ ID NO: 100094 - protein, 31 aa, Artificial Sequence
  Cyclic GFR-binding peptide
SNITMQIMRIKPHQGQHLGEMSEIVRKKPIF

SEQ ID NO: 100095 - protein, 31 aa, Artificial Sequence
  Cyclic GFR-binding peptide
SNITVQIMEYVRKKPKLIGEMSEIVRKKPIF

SEQ ID NO: 100096 - protein, 31 aa, Artificial Sequence
  Cyclic GFR-binding peptide
SNITVQIMEIVRKKPIFLGEMSEIVRKKPIF

SEQ ID NO: 100097 - protein, 31 aa, Artificial Sequence
  Cyclic GFR-binding peptide
RPVQVRKIEIVRKKPIFKKATVEIVRKKPIF

SEQ ID NO: 100098 - protein, 31 aa, Artificial Sequence
  Cyclic GFR-binding peptide
SNITMQIMRIKPHQGQHIGEMSEIVRKKPIF

SEQ ID NO: 100099 - protein, 29 aa, Artificial Sequence
  Cyclic GFR-binding peptide
EIVRKKPIFEYKFKVKPTRGVLYLISIPE

SEQ ID NO: 100100 - protein, 29 aa, Artificial Sequence
  Cyclic GFR-binding peptide
EIVRKKPIFEYKFKTPVGMDDLYLVSIPE

SEQ ID NO: 100101 - protein, 29 aa, Artificial Sequence
  Cyclic GFR-binding peptide
EIVRKKPIFEYQKYVKPKRGVIYLISIPS

SEQ ID NO: 100102 - protein, 29 aa, Artificial Sequence
  Cyclic GFR-binding peptide
EIVRKKPIFEYQKYVVKDYEDIYLMSIPS

SEQ ID NO: 100103 - protein, 29 aa, Artificial Sequence
  Cyclic GFR-binding peptide
EIVRKKPIFEYKFKIKPTKGILYLISIPE

SEQ ID NO: 100104 - protein, 29 aa, Artificial Sequence
  Cyclic GFR-binding peptide
EIVRKKPIFYHYKLYTVVGKDKYLISIPS

SEQ ID NO: 100105 - protein, 29 aa, Artificial Sequence
  Cyclic GFR-binding peptide
EIVRKKPIFRYKKLYTVVGKDFYLISIAN

SEQ ID NO: 100106 - protein, 29 aa, Artificial Sequence
  Cyclic GFR-binding peptide
EIVRKKPIFEYQKYVVNNAADIYLISIPS

SEQ ID NO: 100107 - protein, 29 aa, Artificial Sequence
  Cyclic GFR-binding peptide
EIVRKKPIFEYQKYVKPTRGVIYLISIPS

SEQ ID NO: 100108 - protein, 29 aa, Artificial Sequence
  Cyclic GFR-binding peptide
EIVRKKPIFEYQKYTPVGMDDIYLVSIPS

SEQ ID NO: 100109 - protein, 29 aa, Artificial Sequence
  Cyclic GFR-binding peptide
EIVRKKPIFEYKFKVVKDYEDLYLMSIPE

SEQ ID NO: 100110 - protein, 29 aa, Artificial Sequence
  Cyclic GFR-binding peptide
EIVRKKPIFEYKFKVVNNAADLYLISIPE

SEQ ID NO: 100111 - protein, 29 aa, Artificial Sequence
  Cyclic GFR-binding peptide
EIVRKKPIFEYQKYVVKENEDIYLMSIPS

SEQ ID NO: 100112 - protein, 29 aa, Artificial Sequence
  Cyclic GFR-binding peptide
EIVRKKPIFEYQKYIKPTKGIIYLISIPS

SEQ ID NO: 100113 - protein, 29 aa, Artificial Sequence
  Cyclic GFR-binding peptide
EIVRKKPIFRYKKLVVNNAADFYLISIAN

SEQ ID NO: 100114 - protein, 29 aa, Artificial Sequence
  Cyclic GFR-binding peptide
EIVRKKPIFYHYKLVVNNAADKYLISIPS

SEQ ID NO: 100115 - protein, 29 aa, Artificial Sequence
  Cyclic GFR-binding peptide
EIVRKKPIFEYKFKIVNNSSDLYLVSIPE

SEQ ID NO: 100116 - protein, 29 aa, Artificial Sequence
  Cyclic GFR-binding peptide
EIVRKKPIFEYQKYIVNSSDDIYLVSIPS

SEQ ID NO: 100117 - protein, 29 aa, Artificial Sequence
  Cyclic GFR-binding peptide
EIVRKKPIFEYKFKIVNSSDDLYLVSIPE

SEQ ID NO: 100118 - protein, 29 aa, Artificial Sequence
  Cyclic GFR-binding peptide
EIVRKKPIFEYKFKVKPKRGVLYLISIPE

SEQ ID NO: 100119 - protein, 29 aa, Artificial Sequence
  Cyclic GFR-binding peptide
EIVRKKPIFEYQKYYTVVGKDIYLISIPS

SEQ ID NO: 100120 - protein, 29 aa, Artificial Sequence
  Cyclic GFR-binding peptide
EIVRKKPIFEYKFKVVKENEDLYLMSIPE

SEQ ID NO: 100121 - protein, 29 aa, Artificial Sequence
  Cyclic GFR-binding peptide
EIVRKKPIFEYQKYIVNNSSDIYLVSIPS

SEQ ID NO: 100122 - protein, 29 aa, Artificial Sequence
  Cyclic GFR-binding peptide
EIVRKKPIFEYKFKYTVVGKDLYLISIPE

SEQ ID NO: 100123 - protein, 29 aa, Artificial Sequence
  Cyclic GFR-binding peptide
EPISILYLVGRTPKVKFKYEEIVRKKPIF

SEQ ID NO: 100124 - protein, 29 aa, Artificial Sequence
  Cyclic GFR-binding peptide
EPISVLYLDDMGVPTKFKYEEIVRKKPIF

SEQ ID NO: 100125 - protein, 29 aa, Artificial Sequence
  Cyclic GFR-binding peptide
SPISILYIVGRKPKVYKQYEEIVRKKPIF

SEQ ID NO: 100126 - protein, 29 aa, Artificial Sequence
  Cyclic GFR-binding peptide
SPISMLYIDEYDKVVYKQYEEIVRKKPIF

SEQ ID NO: 100127 - protein, 29 aa, Artificial Sequence
  Cyclic GFR-binding peptide
EPISILYLIGKTPKIKFKYEEIVRKKPIF

SEQ ID NO: 100128 - protein, 29 aa, Artificial Sequence
  Cyclic GFR-binding peptide
SPISILYKDKGVVTYLKYHYEIVRKKPIF

SEQ ID NO: 100129 - protein, 29 aa, Artificial Sequence
  Cyclic GFR-binding peptide
NAISILYFDKGVVTYLKKYREIVRKKPIF

SEQ ID NO: 100130 - protein, 29 aa, Artificial Sequence
  Cyclic GFR-binding peptide
SPISILYIDAANNVVYKQYEEIVRKKPIF

SEQ ID NO: 100131 - protein, 29 aa, Artificial Sequence
  Cyclic GFR-binding peptide
SPISILYIVGRTPKVYKQYEEIVRKKPIF

SEQ ID NO: 100132 - protein, 29 aa, Artificial Sequence
  Cyclic GFR-binding peptide
SPISVLYIDDMGVPTYKQYEEIVRKKPIF

SEQ ID NO: 100133 - protein, 29 aa, Artificial Sequence
  Cyclic GFR-binding peptide
EPISMLYLDEYDKVVKFKYEEIVRKKPIF

SEQ ID NO: 100134 - protein, 29 aa, Artificial Sequence
  Cyclic GFR-binding peptide
EPISILYLDAANNVVKFKYEEIVRKKPIF

SEQ ID NO: 100135 - protein, 29 aa, Artificial Sequence
  Cyclic GFR-binding peptide
SPISMLYIDENEKVVYKQYEEIVRKKPIF

SEQ ID NO: 100136 - protein, 29 aa, Artificial Sequence
  Cyclic GFR-binding peptide
SPISILYIIGKTPKIYKQYEEIVRKKPIF

SEQ ID NO: 100137 - protein, 29 aa, Artificial Sequence
  Cyclic GFR-binding peptide
NAISILYFDAANNVVLKKYREIVRKKPIF

SEQ ID NO: 100138 - protein, 29 aa, Artificial Sequence
  Cyclic GFR-binding peptide
SPISILYKDAANNVVLKYHYEIVRKKPIF

SEQ ID NO: 100139 - protein, 29 aa, Artificial Sequence
  Cyclic GFR-binding peptide
EPISVLYLDSSNNVIKFKYEEIVRKKPIF

SEQ ID NO: 100140 - protein, 29 aa, Artificial Sequence
  Cyclic GFR-binding peptide
SPISVLYIDDSSNVIYKQYEEIVRKKPIF

SEQ ID NO: 100141 - protein, 29 aa, Artificial Sequence
  Cyclic GFR-binding peptide
EPISVLYLDDSSNVIKFKYEEIVRKKPIF

SEQ ID NO: 100142 - protein, 29 aa, Artificial Sequence
  Cyclic GFR-binding peptide
EPISILYLVGRKPKVKFKYEEIVRKKPIF

SEQ ID NO: 100143 - protein, 29 aa, Artificial Sequence
  Cyclic GFR-binding peptide
SPISILYIDKGVVTYYKQYEEIVRKKPIF

SEQ ID NO: 100144 - protein, 29 aa, Artificial Sequence
  Cyclic GFR-binding peptide
EPISMLYLDENEKVVKFKYEEIVRKKPIF

SEQ ID NO: 100145 - protein, 29 aa, Artificial Sequence
  Cyclic GFR-binding peptide
SPISVLYIDSSNNVIYKQYEEIVRKKPIF

SEQ ID NO: 100146 - protein, 29 aa, Artificial Sequence
  Cyclic GFR-binding peptide
EPISILYLDKGVVTYKFKYEEIVRKKPIF

SEQ ID NO: 100147 - protein, 29 aa, Artificial Sequence
  Cyclic GFR-binding peptide
EIVRKKPIFPIKGYIIQQKDNFYLMNIPS

SEQ ID NO: 100148 - protein, 29 aa, Artificial Sequence
  Cyclic GFR-binding peptide
EIVRKKPIFPIKGYVVKDYEDFYLMNIPS

SEQ ID NO: 100149 - protein, 29 aa, Artificial Sequence
  Cyclic GFR-binding peptide
EIVRKKPIFPIKGYIVNSSDDFYLVNIPS

SEQ ID NO: 100150 - protein, 29 aa, Artificial Sequence
  Cyclic GFR-binding peptide
EIVRKKPIFPIKGYVVNNAADFYLINIPS

SEQ ID NO: 100151 - protein, 29 aa, Artificial Sequence
  Cyclic GFR-binding peptide
EIVRKKPIFPIKGYYTVVGKDFYLINIPS

SEQ ID NO: 100152 - protein, 29 aa, Artificial Sequence
  Cyclic GFR-binding peptide
EIVRKKPIFPIKGYLLVRGNDFYLMNIPS

SEQ ID NO: 100153 - protein, 29 aa, Artificial Sequence
  Cyclic GFR-binding peptide
EIVRKKPIFPIKGYVVKENEDFYLMNIPS

SEQ ID NO: 100154 - protein, 29 aa, Artificial Sequence
  Cyclic GFR-binding peptide
EIVRKKPIFPIKGYVVNNASDFYLINIPS

SEQ ID NO: 100155 - protein, 29 aa, Artificial Sequence
  Cyclic GFR-binding peptide
EIVRKKPIFPIKGYTPVGMDDFYLVNIPS

SEQ ID NO: 100156 - protein, 29 aa, Artificial Sequence
  Cyclic GFR-binding peptide
EIVRKKPIFPIKGYIVNNSSDFYLVNIPS

SEQ ID NO: 100157 - protein, 29 aa, Artificial Sequence
  Cyclic GFR-binding peptide
SPINMLYFNDKQQIIYGKIPEIVRKKPIF

SEQ ID NO: 100158 - protein, 29 aa, Artificial Sequence
  Cyclic GFR-binding peptide
SPINMLYFDEYDKVVYGKIPEIVRKKPIF

SEQ ID NO: 100159 - protein, 29 aa, Artificial Sequence
  Cyclic GFR-binding peptide
SPINVLYFDDSSNVIYGKIPEIVRKKPIF

SEQ ID NO: 100160 - protein, 29 aa, Artificial Sequence
  Cyclic GFR-binding peptide
SPINILYFDAANNVVYGKIPEIVRKKPIF

SEQ ID NO: 100161 - protein, 29 aa, Artificial Sequence
  Cyclic GFR-binding peptide
SPINILYFDKGVVTYYGKIPEIVRKKPIF

SEQ ID NO: 100162 - protein, 29 aa, Artificial Sequence
  Cyclic GFR-binding peptide
SPINMLYFDNGRVLLYGKIPEIVRKKPIF

SEQ ID NO: 100163 - protein, 29 aa, Artificial Sequence
  Cyclic GFR-binding peptide
SPINMLYFDENEKVVYGKIPEIVRKKPIF

SEQ ID NO: 100164 - protein, 29 aa, Artificial Sequence
  Cyclic GFR-binding peptide
SPINILYFDSANNVVYGKIPEIVRKKPIF

SEQ ID NO: 100165 - protein, 29 aa, Artificial Sequence
  Cyclic GFR-binding peptide
SPINVLYFDDMGVPTYGKIPEIVRKKPIF

SEQ ID NO: 100166 - protein, 29 aa, Artificial Sequence
  Cyclic GFR-binding peptide
SPINVLYFDSSNNVIYGKIPEIVRKKPIF

SEQ ID NO: 100167 - protein, 29 aa, Artificial Sequence
  Cyclic GFR-binding peptide
EIVRKKPIFEYQKYVVNNASDIYLISIPS

SEQ ID NO: 100168 - protein, 29 aa, Artificial Sequence
  Cyclic GFR-binding peptide
EIVRKKPIFEYQKYIIQQKDNIYLMSIPS

SEQ ID NO: 100169 - protein, 29 aa, Artificial Sequence
  Cyclic GFR-binding peptide
EIVRKKPIFEYQKYLLVRGNDIYLMSIPS

SEQ ID NO: 100170 - protein, 29 aa, Artificial Sequence
  Cyclic GFR-binding peptide
SPISILYIDSANNVVYKQYEEIVRKKPIF

SEQ ID NO: 100171 - protein, 29 aa, Artificial Sequence
  Cyclic GFR-binding peptide
SPISMLYINDKQQIIYKQYEEIVRKKPIF

SEQ ID NO: 100172 - protein, 29 aa, Artificial Sequence
  Cyclic GFR-binding peptide
SPISMLYIDNGRVLLYKQYEEIVRKKPIF

SEQ ID NO: 100173 - protein, 29 aa, Artificial Sequence
  Cyclic GFR-binding peptide
EIVRKKPIFPYVKLYTVVGKDFFLISLSS

SEQ ID NO: 100174 - protein, 29 aa, Artificial Sequence
  Cyclic GFR-binding peptide
EIVRKKPIFPYVKLIKPTKGIFFLISLSS

SEQ ID NO: 100175 - protein, 29 aa, Artificial Sequence
  Cyclic GFR-binding peptide
EIVRKKPIFPYVKLIIQQKDNFFLMSLSS

SEQ ID NO: 100176 - protein, 29 aa, Artificial Sequence
  Cyclic GFR-binding peptide
EIVRKKPIFPYVKLIVNSSDDFFLVSLSS

SEQ ID NO: 100177 - protein, 29 aa, Artificial Sequence
  Cyclic GFR-binding peptide
EIVRKKPIFPYVKLVKPKRGVFFLISLSS

SEQ ID NO: 100178 - protein, 29 aa, Artificial Sequence
  Cyclic GFR-binding peptide
EIVRKKPIFPYVKLVKPTRGVFFLISLSS

SEQ ID NO: 100179 - protein, 29 aa, Artificial Sequence
  Cyclic GFR-binding peptide
EIVRKKPIFPYVKLTPVGMDDFFLVSLSS

SEQ ID NO: 100180 - protein, 31 aa, Artificial Sequence
  Cyclic GFR-binding peptide
EIVRKKPIFPYVKLHQGQHPKIRFFLMSLSS

SEQ ID NO: 100181 - protein, 29 aa, Artificial Sequence
  Cyclic GFR-binding peptide
EIVRKKPIFPYVKLVVNKNEDFFLISLSS

SEQ ID NO: 100182 - protein, 29 aa, Artificial Sequence
  Cyclic GFR-binding peptide
EIVRKKPIFPYVKLVVNNASDFFLISLSS

SEQ ID NO: 100183 - protein, 29 aa, Artificial Sequence
  Cyclic GFR-binding peptide
EIVRKKPIFPYVKLVVKENEDFFLMSLSS

SEQ ID NO: 100184 - protein, 29 aa, Artificial Sequence
  Cyclic GFR-binding peptide
EIVRKKPIFPYVKLIVNNSSDFFLVSLSS

SEQ ID NO: 100185 - protein, 31 aa, Artificial Sequence
  Cyclic GFR-binding peptide
EIVRKKPIFPYVKLLKPKKRVYEFFLVSLSS

SEQ ID NO: 100186 - protein, 29 aa, Artificial Sequence
  Cyclic GFR-binding peptide
EIVRKKPIFPYVKLLLVRGNDFFLMSLSS

SEQ ID NO: 100187 - protein, 29 aa, Artificial Sequence
  Cyclic GFR-binding peptide
EIVRKKPIFPYVKLVVKDYEDFFLMSLSS

SEQ ID NO: 100188 - protein, 29 aa, Artificial Sequence
  Cyclic GFR-binding peptide
EIVRKKPIFPYVKLVVNNAADFFLISLSS

SEQ ID NO: 100189 - protein, 29 aa, Artificial Sequence
  Cyclic GFR-binding peptide
SSLSILFFDKGVVTYLKVYPEIVRKKPIF

SEQ ID NO: 100190 - protein, 29 aa, Artificial Sequence
  Cyclic GFR-binding peptide
SSLSILFFIGKTPKILKVYPEIVRKKPIF

SEQ ID NO: 100191 - protein, 29 aa, Artificial Sequence
  Cyclic GFR-binding peptide
SSLSMLFFNDKQQIILKVYPEIVRKKPIF

SEQ ID NO: 100192 - protein, 29 aa, Artificial Sequence
  Cyclic GFR-binding peptide
SSLSVLFFDDSSNVILKVYPEIVRKKPIF

SEQ ID NO: 100193 - protein, 29 aa, Artificial Sequence
  Cyclic GFR-binding peptide
SSLSILFFVGRKPKVLKVYPEIVRKKPIF

SEQ ID NO: 100194 - protein, 29 aa, Artificial Sequence
  Cyclic GFR-binding peptide
SSLSILFFVGRTPKVLKVYPEIVRKKPIF

SEQ ID NO: 100195 - protein, 29 aa, Artificial Sequence
  Cyclic GFR-binding peptide
SSLSVLFFDDMGVPTLKVYPEIVRKKPIF

SEQ ID NO: 100196 - protein, 31 aa, Artificial Sequence
  Cyclic GFR-binding peptide
SSLSMLFFRIKPHQGQHLKVYPEIVRKKPIF

SEQ ID NO: 100197 - protein, 29 aa, Artificial Sequence
  Cyclic GFR-binding peptide
SSLSILFFDENKNVVLKVYPEIVRKKPIF

SEQ ID NO: 100198 - protein, 29 aa, Artificial Sequence
  Cyclic GFR-binding peptide
SSLSILFFDSANNVVLKVYPEIVRKKPIF

SEQ ID NO: 100199 - protein, 29 aa, Artificial Sequence
  Cyclic GFR-binding peptide
SSLSMLFFDENEKVVLKVYPEIVRKKPIF

SEQ ID NO: 100200 - protein, 29 aa, Artificial Sequence
  Cyclic GFR-binding peptide
SSLSVLFFDSSNNVILKVYPEIVRKKPIF

SEQ ID NO: 100201 - protein, 31 aa, Artificial Sequence
  Cyclic GFR-binding peptide
SSLSVLFFEYVRKKPKLLKVYPEIVRKKPIF

SEQ ID NO: 100202 - protein, 29 aa, Artificial Sequence
  Cyclic GFR-binding peptide
SSLSMLFFDNGRVLLLKVYPEIVRKKPIF

SEQ ID NO: 100203 - protein, 29 aa, Artificial Sequence
  Cyclic GFR-binding peptide
SSLSMLFFDEYDKVVLKVYPEIVRKKPIF

SEQ ID NO: 100204 - protein, 29 aa, Artificial Sequence
  Cyclic GFR-binding peptide
SSLSILFFDAANNVVLKVYPEIVRKKPIF

SEQ ID NO: 100205 - protein, 29 aa, Artificial Sequence
  Cyclic GFR-binding peptide
EIVRKKPIFSMEGIIVNSSDDMIQVTINS

SEQ ID NO: 100206 - protein, 29 aa, Artificial Sequence
  Cyclic GFR-binding peptide
EIVRKKPIFVTAKKVVKENEDIKRMQVPR

SEQ ID NO: 100207 - protein, 29 aa, Artificial Sequence
  Cyclic GFR-binding peptide
EIVRKKPIFSMEGIVVKDYEDMIQMTINS

SEQ ID NO: 100208 - protein, 29 aa, Artificial Sequence
  Cyclic GFR-binding peptide
EIVRKKPIFVTAKKIKPTKGIIKRIQVPR

SEQ ID NO: 100209 - protein, 29 aa, Artificial Sequence
  Cyclic GFR-binding peptide
EIVRKKPIFSMEGIVKPTRGVMIQITINS

SEQ ID NO: 100210 - protein, 31 aa, Artificial Sequence
  Cyclic GFR-binding peptide
EIVRKKPIFNSLQEFIPKKRVIEYYVVPLPE

SEQ ID NO: 100211 - protein, 29 aa, Artificial Sequence
  Cyclic GFR-binding peptide
EIVRKKPIFVQVEKVKPKRGVVKAIKVSR

SEQ ID NO: 100212 - protein, 29 aa, Artificial Sequence
  Cyclic GFR-binding peptide
EIVRKKPIFVQVEKVVKENEDVKAMKVSR

SEQ ID NO: 100213 - protein, 29 aa, Artificial Sequence
  Cyclic GFR-binding peptide
EIVRKKPIFVTAKKIVNSSDDIKRVQVPR

SEQ ID NO: 100214 - protein, 29 aa, Artificial Sequence
  Cyclic GFR-binding peptide
EIVRKKPIFVQVEKIKPTKGIVKAIKVSR

SEQ ID NO: 100215 - protein, 31 aa, Artificial Sequence
  Cyclic GFR-binding peptide
EIVRKKPIFNSLQEFIPKKRVIEYYLVTLPE

SEQ ID NO: 100216 - protein, 29 aa, Artificial Sequence
  Cyclic GFR-binding peptide
EIVRKKPIFVQVEKIVNSSDDVKAVKVSR

SEQ ID NO: 100217 - protein, 29 aa, Artificial Sequence
  Cyclic GFR-binding peptide
EIVRKKPIFVTAKKVKPKRGVIKRIQVPR

SEQ ID NO: 100218 - protein, 29 aa, Artificial Sequence
  Cyclic GFR-binding peptide
EIVRKKPIFVQVEKVKPTRGVVKAIKVSR

SEQ ID NO: 100219 - protein, 29 aa, Artificial Sequence
  Cyclic GFR-binding peptide
EIVRKKPIFVTAKKVKPTRGVIKRIQVPR

SEQ ID NO: 100220 - protein, 31 aa, Artificial Sequence
  Cyclic GFR-binding peptide
EIVRKKPIFNSLQELKPKKRVYEYYLVTLPE

SEQ ID NO: 100221 - protein, 29 aa, Artificial Sequence
  Cyclic GFR-binding peptide
EIVRKKPIFSMEGIVKPKRGVMIQITINS

SEQ ID NO: 100222 - protein, 29 aa, Artificial Sequence
  Cyclic GFR-binding peptide
EIVRKKPIFSMEGIVVKENEDMIQMTINS

SEQ ID NO: 100223 - protein, 29 aa, Artificial Sequence
  Cyclic GFR-binding peptide
EIVRKKPIFSMEGIIKPTKGIMIQITINS

SEQ ID NO: 100224 - protein, 31 aa, Artificial Sequence
  Cyclic GFR-binding peptide
EIVRKKPIFNSLQEHQGQHPKIRYYLMTLPE

SEQ ID NO: 100225 - protein, 29 aa, Artificial Sequence
  Cyclic GFR-binding peptide
EIVRKKPIFVTAKKVVKDYEDIKRMQVPR

SEQ ID NO: 100226 - protein, 31 aa, Artificial Sequence
  Cyclic GFR-binding peptide
EIVRKKPIFNSLQEHQGQHPKIRYYVMPLPE

SEQ ID NO: 100227 - protein, 31 aa, Artificial Sequence
  Cyclic GFR-binding peptide
EIVRKKPIFNSLQELKPKKRVYEYYVVPLPE

SEQ ID NO: 100228 - protein, 29 aa, Artificial Sequence
  Cyclic GFR-binding peptide
EIVRKKPIFVQVEKVVKDYEDVKAMKVSR

SEQ ID NO: 100229 - protein, 29 aa, Artificial Sequence
  Cyclic GFR-binding peptide
SNITVQIMDDSSNVIIGEMSEIVRKKPIF

SEQ ID NO: 100230 - protein, 29 aa, Artificial Sequence
  Cyclic GFR-binding peptide
RPVQMRKIDENEKVVKKATVEIVRKKPIF

SEQ ID NO: 100231 - protein, 29 aa, Artificial Sequence
  Cyclic GFR-binding peptide
SNITMQIMDEYDKVVIGEMSEIVRKKPIF

SEQ ID NO: 100232 - protein, 29 aa, Artificial Sequence
  Cyclic GFR-binding peptide
RPVQIRKIIGKTPKIKKATVEIVRKKPIF

SEQ ID NO: 100233 - protein, 29 aa, Artificial Sequence
  Cyclic GFR-binding peptide
SNITIQIMVGRTPKVIGEMSEIVRKKPIF

SEQ ID NO: 100234 - protein, 31 aa, Artificial Sequence
  Cyclic GFR-binding peptide
EPLPVVYYEIVRKKPIFEQLSNEIVRKKPIF

SEQ ID NO: 100235 - protein, 29 aa, Artificial Sequence
  Cyclic GFR-binding peptide
RSVKIAKVVGRKPKVKEVQVEIVRKKPIF

SEQ ID NO: 100236 - protein, 29 aa, Artificial Sequence
  Cyclic GFR-binding peptide
RSVKMAKVDENEKVVKEVQVEIVRKKPIF

SEQ ID NO: 100237 - protein, 29 aa, Artificial Sequence
  Cyclic GFR-binding peptide
RPVQVRKIDDSSNVIKKATVEIVRKKPIF

SEQ ID NO: 100238 - protein, 29 aa, Artificial Sequence
  Cyclic GFR-binding peptide
RSVKIAKVIGKTPKIKEVQVEIVRKKPIF

SEQ ID NO: 100239 - protein, 31 aa, Artificial Sequence
  Cyclic GFR-binding peptide
EPLTVLYYEIVRKKPIFEQLSNEIVRKKPIF

SEQ ID NO: 100240 - protein, 29 aa, Artificial Sequence
  Cyclic GFR-binding peptide
RSVKVAKVDDSSNVIKEVQVEIVRKKPIF

SEQ ID NO: 100241 - protein, 29 aa, Artificial Sequence
  Cyclic GFR-binding peptide
RPVQIRKIVGRKPKVKKATVEIVRKKPIF

SEQ ID NO: 100242 - protein, 29 aa, Artificial Sequence
  Cyclic GFR-binding peptide
RSVKIAKVVGRTPKVKEVQVEIVRKKPIF

SEQ ID NO: 100243 - protein, 29 aa, Artificial Sequence
  Cyclic GFR-binding peptide
RPVQIRKIVGRTPKVKKATVEIVRKKPIF

SEQ ID NO: 100244 - protein, 31 aa, Artificial Sequence
  Cyclic GFR-binding peptide
EPLTVLYYEYVRKKPKLEQLSNEIVRKKPIF

SEQ ID NO: 100245 - protein, 29 aa, Artificial Sequence
  Cyclic GFR-binding peptide
SNITIQIMVGRKPKVIGEMSEIVRKKPIF

SEQ ID NO: 100246 - protein, 29 aa, Artificial Sequence
  Cyclic GFR-binding peptide
SNITMQIMDENEKVVIGEMSEIVRKKPIF

SEQ ID NO: 100247 - protein, 29 aa, Artificial Sequence
  Cyclic GFR-binding peptide
SNITIQIMIGKTPKIIGEMSEIVRKKPIF

SEQ ID NO: 100248 - protein, 31 aa, Artificial Sequence
  Cyclic GFR-binding peptide
EPLTMLYYRIKPHQGQHEQLSNEIVRKKPIF

SEQ ID NO: 100249 - protein, 29 aa, Artificial Sequence
  Cyclic GFR-binding peptide
RPVQMRKIDEYDKVVKKATVEIVRKKPIF

SEQ ID NO: 100250 - protein, 31 aa, Artificial Sequence
  Cyclic GFR-binding peptide
EPLPMVYYRIKPHQGQHEQLSNEIVRKKPIF

SEQ ID NO: 100251 - protein, 31 aa, Artificial Sequence
  Cyclic GFR-binding peptide
EPLPVVYYEYVRKKPKLEQLSNEIVRKKPIF

SEQ ID NO: 100252 - protein, 29 aa, Artificial Sequence
  Cyclic GFR-binding peptide
RSVKMAKVDEYDKVVKEVQVEIVRKKPIF

SEQ ID NO: 100253 - protein, 29 aa, Artificial Sequence
  Cyclic GFR-binding peptide
EIVRKKPIFRYKKLIIQQKDNFYLMSIAN

SEQ ID NO: 100254 - protein, 29 aa, Artificial Sequence
  Cyclic GFR-binding peptide
EIVRKKPIFRYKKLLLVRGNDFYLMSIAN

SEQ ID NO: 100255 - protein, 29 aa, Artificial Sequence
  Cyclic GFR-binding peptide
NAISMLYFNDKQQIILKKYREIVRKKPIF

SEQ ID NO: 100256 - protein, 29 aa, Artificial Sequence
  Cyclic GFR-binding peptide
NAISMLYFDNGRVLLLKKYREIVRKKPIF

SEQ ID NO: 100257 - protein, 29 aa, Artificial Sequence
  Cyclic GFR-binding peptide
EIVRKKPIFEYKFKVVNKNEDLYLISIPE

SEQ ID NO: 100258 - protein, 29 aa, Artificial Sequence
  Cyclic GFR-binding peptide
EIVRKKPIFPIKGYVKPTRGVFYLINIPS

SEQ ID NO: 100259 - protein, 29 aa, Artificial Sequence
  Cyclic GFR-binding peptide
EIVRKKPIFEYKFKLLVRGNDLYLMSIPE

SEQ ID NO: 100260 - protein, 29 aa, Artificial Sequence
  Cyclic GFR-binding peptide
EIVRKKPIFYHYKLVVNKNEDKYLISIPS

SEQ ID NO: 100261 - protein, 29 aa, Artificial Sequence
  Cyclic GFR-binding peptide
EIVRKKPIFRHKRLLLVRGNDYYLMSTAS

SEQ ID NO: 100262 - protein, 29 aa, Artificial Sequence
  Cyclic GFR-binding peptide
EIVRKKPIFYHYKLLLVRGNDKYLMSIPS

SEQ ID NO: 100263 - protein, 29 aa, Artificial Sequence
  Cyclic GFR-binding peptide
EIVRKKPIFRHKRLVVNKNEDYYLISTAS

SEQ ID NO: 100264 - protein, 29 aa, Artificial Sequence
  Cyclic GFR-binding peptide
EIVRKKPIFRYKKLVVNKNEDFYLISIAN

SEQ ID NO: 100265 - protein, 29 aa, Artificial Sequence
  Cyclic GFR-binding peptide
EIVRKKPIFPIKGYVVNKNEDFYLINIPS

SEQ ID NO: 100266 - protein, 29 aa, Artificial Sequence
  Cyclic GFR-binding peptide
EIVRKKPIFPIKGYIKPTKGIFYLINIPS

SEQ ID NO: 100267 - protein, 29 aa, Artificial Sequence
  Cyclic GFR-binding peptide
EIVRKKPIFRHKRLYTVVGKDYYLISTAS

SEQ ID NO: 100268 - protein, 29 aa, Artificial Sequence
  Cyclic GFR-binding peptide
EIVRKKPIFEYKFKVVNNASDLYLISIPE

SEQ ID NO: 100269 - protein, 29 aa, Artificial Sequence
  Cyclic GFR-binding peptide
EIVRKKPIFRHKRLIIQQKDNYYLMSTAS

SEQ ID NO: 100270 - protein, 29 aa, Artificial Sequence
  Cyclic GFR-binding peptide
EIVRKKPIFEYKFKIIQQKDNLYLMSIPE

SEQ ID NO: 100271 - protein, 29 aa, Artificial Sequence
  Cyclic GFR-binding peptide
EIVRKKPIFPIKGYVKPKRGVFYLINIPS

SEQ ID NO: 100272 - protein, 29 aa, Artificial Sequence
  Cyclic GFR-binding peptide
EIVRKKPIFRHKRLVVNNASDYYLISTAS

SEQ ID NO: 100273 - protein, 29 aa, Artificial Sequence
  Cyclic GFR-binding peptide
EIVRKKPIFYHYKLVVNNASDKYLISIPS

SEQ ID NO: 100274 - protein, 29 aa, Artificial Sequence
  Cyclic GFR-binding peptide
EIVRKKPIFYHYKLIIQQKDNKYLMSIPS

SEQ ID NO: 100275 - protein, 29 aa, Artificial Sequence
  Cyclic GFR-binding peptide
EIVRKKPIFRHKRLVVNNAADYYLISTAS

SEQ ID NO: 100276 - protein, 29 aa, Artificial Sequence
  Cyclic GFR-binding peptide
EPISILYLDENKNVVKFKYEEIVRKKPIF

SEQ ID NO: 100277 - protein, 29 aa, Artificial Sequence
  Cyclic GFR-binding peptide
SPINILYFVGRTPKVYGKIPEIVRKKPIF

SEQ ID NO: 100278 - protein, 29 aa, Artificial Sequence
  Cyclic GFR-binding peptide
EPISMLYLDNGRVLLKFKYEEIVRKKPIF

SEQ ID NO: 100279 - protein, 29 aa, Artificial Sequence
  Cyclic GFR-binding peptide
SPISILYKDENKNVVLKYHYEIVRKKPIF

SEQ ID NO: 100280 - protein, 29 aa, Artificial Sequence
  Cyclic GFR-binding peptide
SATSMLYYDNGRVLLLRKHREIVRKKPIF

SEQ ID NO: 100281 - protein, 29 aa, Artificial Sequence
  Cyclic GFR-binding peptide
SPISMLYKDNGRVLLLKYHYEIVRKKPIF

SEQ ID NO: 100282 - protein, 29 aa, Artificial Sequence
  Cyclic GFR-binding peptide
SATSILYYDENKNVVLRKHREIVRKKPIF

SEQ ID NO: 100283 - protein, 29 aa, Artificial Sequence
  Cyclic GFR-binding peptide
NAISILYFDENKNVVLKKYREIVRKKPIF

SEQ ID NO: 100284 - protein, 29 aa, Artificial Sequence
  Cyclic GFR-binding peptide
SPINILYFDENKNVVYGKIPEIVRKKPIF

SEQ ID NO: 100285 - protein, 29 aa, Artificial Sequence
  Cyclic GFR-binding peptide
SPINILYFIGKTPKIYGKIPEIVRKKPIF

SEQ ID NO: 100286 - protein, 29 aa, Artificial Sequence
  Cyclic GFR-binding peptide
SATSILYYDKGVVTYLRKHREIVRKKPIF

SEQ ID NO: 100287 - protein, 29 aa, Artificial Sequence
  Cyclic GFR-binding peptide
EPISILYLDSANNVVKFKYEEIVRKKPIF

SEQ ID NO: 100288 - protein, 29 aa, Artificial Sequence
  Cyclic GFR-binding peptide
SATSMLYYNDKQQIILRKHREIVRKKPIF

SEQ ID NO: 100289 - protein, 29 aa, Artificial Sequence
  Cyclic GFR-binding peptide
EPISMLYLNDKQQIIKFKYEEIVRKKPIF

SEQ ID NO: 100290 - protein, 29 aa, Artificial Sequence
  Cyclic GFR-binding peptide
SPINILYFVGRKPKVYGKIPEIVRKKPIF

SEQ ID NO: 100291 - protein, 29 aa, Artificial Sequence
  Cyclic GFR-binding peptide
SATSILYYDSANNVVLRKHREIVRKKPIF

SEQ ID NO: 100292 - protein, 29 aa, Artificial Sequence
  Cyclic GFR-binding peptide
SPISILYKDSANNVVLKYHYEIVRKKPIF

SEQ ID NO: 100293 - protein, 29 aa, Artificial Sequence
  Cyclic GFR-binding peptide
SPISMLYKNDKQQIILKYHYEIVRKKPIF

SEQ ID NO: 100294 - protein, 29 aa, Artificial Sequence
  Cyclic GFR-binding peptide
SATSILYYDAANNVVLRKHREIVRKKPIF

SEQ ID NO: 100295 - protein, 29 aa, Artificial Sequence
  Cyclic GFR-binding peptide
EIVRKKPIFSMEGIIIQQKDNMIQMTINS

SEQ ID NO: 100296 - protein, 29 aa, Artificial Sequence
  Cyclic GFR-binding peptide
EIVRKKPIFSMEGLVKPKRGVMIQITINS

SEQ ID NO: 100297 - protein, 29 aa, Artificial Sequence
  Cyclic GFR-binding peptide
EIVRKKPIFSMEGLVVNNASDMIQITINS

SEQ ID NO: 100298 - protein, 29 aa, Artificial Sequence
  Cyclic GFR-binding peptide
EIVRKKPIFSMEGILLVRGNDMIQMTINS

SEQ ID NO: 100299 - protein, 29 aa, Artificial Sequence
  Cyclic GFR-binding peptide
EIVRKKPIFSMEGLIKPTKGIMIQITINS

SEQ ID NO: 100300 - protein, 29 aa, Artificial Sequence
  Cyclic GFR-binding peptide
EIVRKKPIFSMEGLIVNSSDDMIQVTINS

SEQ ID NO: 100301 - protein, 29 aa, Artificial Sequence
  Cyclic GFR-binding peptide
EIVRKKPIFSMEGIVVNNASDMIQITINS

SEQ ID NO: 100302 - protein, 29 aa, Artificial Sequence
  Cyclic GFR-binding peptide
EIVRKKPIFSMEGLVVNNAADMIQITINS

SEQ ID NO: 100303 - protein, 29 aa, Artificial Sequence
  Cyclic GFR-binding peptide
EIVRKKPIFSMEGLLLVRGNDMIQMTINS

SEQ ID NO: 100304 - protein, 29 aa, Artificial Sequence
  Cyclic GFR-binding peptide
EIVRKKPIFSMEGLIIQQKDNMIQMTINS

SEQ ID NO: 100305 - protein, 29 aa, Artificial Sequence
  Cyclic GFR-binding peptide
EIVRKKPIFSMEGIVVNNAADMIQITINS

SEQ ID NO: 100306 - protein, 29 aa, Artificial Sequence
  Cyclic GFR-binding peptide
EIVRKKPIFSMEGLVKPTRGVMIQITINS

SEQ ID NO: 100307 - protein, 29 aa, Artificial Sequence
  Cyclic GFR-binding peptide
SNITMQIMNDKQQIIIGEMSEIVRKKPIF

SEQ ID NO: 100308 - protein, 29 aa, Artificial Sequence
  Cyclic GFR-binding peptide
SNITIQIMVGRKPKVLGEMSEIVRKKPIF

SEQ ID NO: 100309 - protein, 29 aa, Artificial Sequence
  Cyclic GFR-binding peptide
SNITIQIMDSANNVVLGEMSEIVRKKPIF

SEQ ID NO: 100310 - protein, 29 aa, Artificial Sequence
  Cyclic GFR-binding peptide
SNITMQIMDNGRVLLIGEMSEIVRKKPIF

SEQ ID NO: 100311 - protein, 29 aa, Artificial Sequence
  Cyclic GFR-binding peptide
SNITIQIMIGKTPKILGEMSEIVRKKPIF

SEQ ID NO: 100312 - protein, 29 aa, Artificial Sequence
  Cyclic GFR-binding peptide
SNITVQIMDDSSNVILGEMSEIVRKKPIF

SEQ ID NO: 100313 - protein, 29 aa, Artificial Sequence
  Cyclic GFR-binding peptide
SNITIQIMDSANNVVIGEMSEIVRKKPIF

SEQ ID NO: 100314 - protein, 29 aa, Artificial Sequence
  Cyclic GFR-binding peptide
SNITIQIMDAANNVVLGEMSEIVRKKPIF

SEQ ID NO: 100315 - protein, 29 aa, Artificial Sequence
  Cyclic GFR-binding peptide
SNITMQIMDNGRVLLLGEMSEIVRKKPIF

SEQ ID NO: 100316 - protein, 29 aa, Artificial Sequence
  Cyclic GFR-binding peptide
SNITMQIMNDKQQIILGEMSEIVRKKPIF

SEQ ID NO: 100317 - protein, 29 aa, Artificial Sequence
  Cyclic GFR-binding peptide
SNITIQIMDAANNVVIGEMSEIVRKKPIF

SEQ ID NO: 100318 - protein, 29 aa, Artificial Sequence
  Cyclic GFR-binding peptide
SNITIQIMVGRTPKVLGEMSEIVRKKPIF

SEQ ID NO: 100319 - protein, 29 aa, Artificial Sequence
  Cyclic GFR-binding peptide
EIVRKKPIFQYNKLVVNKNEDLYLISIAS

SEQ ID NO: 100320 - protein, 29 aa, Artificial Sequence
  Cyclic GFR-binding peptide
EIVRKKPIFQYNKLVVNNAADLYLISIAS

SEQ ID NO: 100321 - protein, 29 aa, Artificial Sequence
  Cyclic GFR-binding peptide
EIVRKKPIFQYNKLIIQQKDNLYLMSIAS

SEQ ID NO: 100322 - protein, 29 aa, Artificial Sequence
  Cyclic GFR-binding peptide
EIVRKKPIFQYNKLLLVRGNDLYLMSIAS

SEQ ID NO: 100323 - protein, 29 aa, Artificial Sequence
  Cyclic GFR-binding peptide
EIVRKKPIFQYNKLYTVVGKDLYLISIAS

SEQ ID NO: 100324 - protein, 29 aa, Artificial Sequence
  Cyclic GFR-binding peptide
SAISILYLDENKNVVLKNYQEIVRKKPIF

SEQ ID NO: 100325 - protein, 29 aa, Artificial Sequence
  Cyclic GFR-binding peptide
SAISILYLDAANNVVLKNYQEIVRKKPIF

SEQ ID NO: 100326 - protein, 29 aa, Artificial Sequence
  Cyclic GFR-binding peptide
SAISMLYLNDKQQIILKNYQEIVRKKPIF

SEQ ID NO: 100327 - protein, 29 aa, Artificial Sequence
  Cyclic GFR-binding peptide
SAISMLYLDNGRVLLLKNYQEIVRKKPIF

SEQ ID NO: 100328 - protein, 29 aa, Artificial Sequence
  Cyclic GFR-binding peptide
SAISILYLDKGVVTYLKNYQEIVRKKPIF

SEQ ID NO: 100329 - protein, 7 aa, Artificial Sequence
  Building block peptide "PEP"
  MOD_RES (6), (7): Xaa is C or S
KIPKAXX

SEQ ID NO: 100330 - protein, 7 aa, Artificial Sequence
  Building block peptide "PEP"
  MOD_RES (6), (7): Xaa is C or S
GIPEPXX

SEQ ID NO: 100331 - protein, 7 aa, Artificial Sequence
  Building block peptide "PEP"
  MOD_RES (6), (7): Xaa is C or S
SIPKAXX

SEQ ID NO: 100332 - protein, 7 aa, Artificial Sequence
  Building block peptide "PEP"
  MOD_RES (7), (7): Xaa is C or S
HVTKPTX

SEQ ID NO: 100333 - protein, 7 aa, Artificial Sequence
  Building block peptide "PEP"
  MOD_RES (6), (7): Xaa is C or S
YVPKPXX

SEQ ID NO: 100334 - protein, 7 aa, Artificial Sequence
  Building block peptide "PEP"
  MOD_RES (6), (7): Xaa is C or S
TVPKPXX

SEQ ID NO: 100335 - protein, 7 aa, Artificial Sequence
  Building block peptide "PEP"
  MOD_RES (6), (7): Xaa is C or S
AVPKAXX

SEQ ID NO: 100336 - protein, 7 aa, Artificial Sequence
  Building block peptide "PEP"
  MOD_RES (6), (7): Xaa is C or S
KVGKAXX

SEQ ID NO: 100337 - protein, 7 aa, Artificial Sequence
  Building block peptide "PEP"
  MOD_RES (6), (7): Xaa is C or S
KASKAXX

SEQ ID NO: 100338 - protein, 7 aa, Artificial Sequence
  Building block peptide "PEP"
  MOD_RES (6), (7): Xaa is C or S
GSAGPXX

SEQ ID NO: 100339 - protein, 7 aa, Artificial Sequence
  Building block peptide "PEP"
  MOD_RES (6), (7): Xaa is C or S
AAPASXX

SEQ ID NO: 100340 - protein, 7 aa, Artificial Sequence
  Building block peptide "PEP"
  MOD_RES (6), (7): Xaa is C or S
STPPTXX

SEQ ID NO: 100341 - protein, 7 aa, Artificial Sequence
  Building block peptide "PEP"
  MOD_RES (6), (7): Xaa is C or S
HVPKPXX

SEQ ID NO: 100342 - protein, 7 aa, Artificial Sequence
  Building block peptide "PEP"
  MOD_RES (6), (7): Xaa is C or S
RVPSTXX

SEQ ID NO: 100343 - protein, 7 aa, Artificial Sequence
  Building block peptide "PEP"
  MOD_RES (6), (7): Xaa is C or S
ASAAPXX

SEQ ID NO: 100344 - protein, 7 aa, Artificial Sequence
  Building block peptide "PEP"
  MOD_RES (6), (7): Xaa is C or S
ASASPXX

SEQ ID NO: 100345 - protein, 7 aa, Artificial Sequence
  Building block peptide "PEP"
  MOD_RES (7), (7): Xaa is C or S
NDEGLEX

SEQ ID NO: 100346 - protein, 7 aa, Artificial Sequence
  Building block peptide "PEP"
  MOD_RES (5), (5): Xaa is C or S
SSVKXQP

SEQ ID NO: 100347 - protein, 7 aa, Artificial Sequence
  Building block peptide "PEP"
  MOD_RES (5), (5): Xaa is C or S
RNVQXRP

SEQ ID NO: 100348 - protein, 4 aa, Artificial Sequence
  Building block peptide "PEP"
SAIS

SEQ ID NO: 100349 - protein, 4 aa, Artificial Sequence
  Building block peptide "PEP"
SSLS

SEQ ID NO: 100350 - protein, 4 aa, Artificial Sequence
  Building block peptide "PEP"
NAIS

SEQ ID NO: 100351 - protein, 4 aa, Artificial Sequence
  Building block peptide "PEP"
SATS

SEQ ID NO: 100352 - protein, 4 aa, Artificial Sequence
  Building block peptide "PEP"
SPIS

SEQ ID NO: 100353 - protein, 4 aa, Artificial Sequence
  Building block peptide "PEP"
EPIS

SEQ ID NO: 100354 - protein, 4 aa, Artificial Sequence
  Building block peptide "PEP"
SPIN

SEQ ID NO: 100355 - protein, 4 aa, Artificial Sequence
  Building block peptide "PEP"
KPLS

SEQ ID NO: 100356 - protein, 4 aa, Artificial Sequence
  Building block peptide "PEP"
EPLP

SEQ ID NO: 100357 - protein, 4 aa, Artificial Sequence
  Building block peptide "PEP"
EPLT

SEQ ID NO: 100358 - protein, 4 aa, Artificial Sequence
  Building block peptide "PEP"
SNIT

SEQ ID NO: 100359 - protein, 4 aa, Artificial Sequence
  Building block peptide "PEP"
RSVK

SEQ ID NO: 100360 - protein, 4 aa, Artificial Sequence
  Building block peptide "PEP"
RPVQ

SEQ ID NO: 100361 - protein, 7 aa, Artificial Sequence
  Building block peptide "PEP"
DENEKVV

SEQ ID NO: 100362 - protein, 7 aa, Artificial Sequence
  Building block peptide "PEP"
DENKNVV

SEQ ID NO: 100363 - protein, 7 aa, Artificial Sequence
  Building block peptide "PEP"
DEYDKVV

SEQ ID NO: 100364 - protein, 7 aa, Artificial Sequence
  Building block peptide "PEP"
DDSSNVI

SEQ ID NO: 100365 - protein, 7 aa, Artificial Sequence
  Building block peptide "PEP"
DSSNNVI

SEQ ID NO: 100366 - protein, 7 aa, Artificial Sequence
  Building block peptide "PEP"
DDMGVPT

SEQ ID NO: 100367 - protein, 7 aa, Artificial Sequence
  Building block peptide "PEP"
DKGVVTY

SEQ ID NO: 100368 - protein, 7 aa, Artificial Sequence
  Building block peptide "PEP"
NDKQQII

SEQ ID NO: 100369 - protein, 7 aa, Artificial Sequence
  Building block peptide "PEP"
DAANNVV

SEQ ID NO: 100370 - protein, 7 aa, Artificial Sequence
  Building block peptide "PEP"
DSANNVV

SEQ ID NO: 100371 - protein, 7 aa, Artificial Sequence
  Building block peptide "PEP"
DNGRVLL

SEQ ID NO: 100372 - protein, 7 aa, Artificial Sequence
  Building block peptide "PEP"
VGRKPKV

SEQ ID NO: 100373 - protein, 7 aa, Artificial Sequence
  Building block peptide "PEP"
IGKTPKI

SEQ ID NO: 100374 - protein, 7 aa, Artificial Sequence
  Building block peptide "PEP"
VGRTPKV

SEQ ID NO: 100375 - protein, 9 aa, Artificial Sequence
  Building block peptide "PEP"
RIKPHQGQH

SEQ ID NO: 100376 - protein, 9 aa, Artificial Sequence
  Building block peptide "PEP"
EYVRKKPKL

SEQ ID NO: 100377 - protein, 9 aa, Artificial Sequence
  Building block peptide "PEP"
EIVRKKPIF

SEQ ID NO: 100378 - protein, 5 aa, Artificial Sequence
  Building block peptide "PEP"
LKNYQ

SEQ ID NO: 100379 - protein, 5 aa, Artificial Sequence
  Building block peptide "PEP"
LKVYP

SEQ ID NO: 100380 - protein, 5 aa, Artificial Sequence
  Building block peptide "PEP"
LKKYR

SEQ ID NO: 100381 - protein, 5 aa, Artificial Sequence
  Building block peptide "PEP"
LRKHR

SEQ ID NO: 100382 - protein, 5 aa, Artificial Sequence
  Building block peptide "PEP"
LKYHY

SEQ ID NO: 100383 - protein, 5 aa, Artificial Sequence
  Building block peptide "PEP"
KFKYE

SEQ ID NO: 100384 - protein, 5 aa, Artificial Sequence
  Building block peptide "PEP"
YGKIP

SEQ ID NO: 100385 - protein, 5 aa, Artificial Sequence
  Building block peptide "PEP"
YKQYE

SEQ ID NO: 100386 - protein, 5 aa, Artificial Sequence
  Building block peptide "PEP"
DHHKD

SEQ ID NO: 100387 - protein, 5 aa, Artificial Sequence
  Building block peptide "PEP"
EQLSN

SEQ ID NO: 100388 - protein, 5 aa, Artificial Sequence
  Building block peptide "PEP"
IGEMS

SEQ ID NO: 100389 - protein, 5 aa, Artificial Sequence
  Building block peptide "PEP"
LGEMS

SEQ ID NO: 100390 - protein, 5 aa, Artificial Sequence
  Building block peptide "PEP"
KEVQV

SEQ ID NO: 100391 - protein, 5 aa, Artificial Sequence
  Building block peptide "PEP"
KKATV

SEQ ID NO: 100392 - protein, 5 aa, Artificial Sequence
  Building block peptide "PEP"
  MOD_RES (2), (4): Xaa is C or S
GXGXR

SEQ ID NO: 100393 - protein, 5 aa, Artificial Sequence
  Building block peptide "PEP"
  MOD_RES (2), (4): Xaa is C or S
SXAXR

SEQ ID NO: 100394 - protein, 5 aa, Artificial Sequence
  Building block peptide "PEP"
  MOD_RES (2), (4): Xaa is C or S
SXGXH

SEQ ID NO: 100395 - protein, 5 aa, Artificial Sequence
  Building block peptide "PEP"
  MOD_RES (2), (4): Xaa is C or S
AXGXH

SEQ ID NO: 100396 - protein, 4 aa, Artificial Sequence
  Building block peptide "PEP"
  MOD_RES (1), (3): Xaa is C or S
XGXR

SEQ ID NO: 100397 - protein, 5 aa, Artificial Sequence
  Building block peptide "PEP"
  MOD_RES (2), (4): Xaa is C or S
EXGXR

SEQ ID NO: 100398 - protein, 5 aa, Artificial Sequence
  Building block peptide "PEP"
  MOD_RES (2), (4): Xaa is C or S
RXGXS

SEQ ID NO: 100399 - protein, 5 aa, Artificial Sequence
  Building block peptide "PEP"
  MOD_RES (2), (4): Xaa is C or S
AXGXR

SEQ ID NO: 100400 - protein, 5 aa, Artificial Sequence
  Building block peptide "PEP"
  MOD_RES (2), (4): Xaa is C or S
SXGXR

SEQ ID NO: 100401 - protein, 4 aa, Artificial Sequence
  Building block peptide "PEP"
  MOD_RES (1), (3): Xaa is C or S
XGXL

SEQ ID NO: 100402 - protein, 4 aa, Artificial Sequence
  Building block peptide "PEP"
  MOD_RES (1), (3): Xaa is C or S
XKXS

SEQ ID NO: 100403 - protein, 5 aa, Artificial Sequence
  Building block peptide "PEP"
  MOD_RES (2), (4): Xaa is C or S
KXEXR

SEQ ID NO: 100404 - protein, 5 aa, Artificial Sequence
  Building block peptide "PEP"
  MOD_RES (2), (4): Xaa is C or S
QXEXR

SEQ ID NO: 100405 - protein, 6 aa, Artificial Sequence
  Building block peptide "PEP"
  MOD_RES (3), (5): Xaa is C or S
LEXAXA

SEQ ID NO: 100406 - protein, 6 aa, Artificial Sequence
  Building block peptide "PEP"
  MOD_RES (3), (5): Xaa is C or S
LAXKXE
